United States Patent Application Publication US 2026/0258423 A1 - sequence listing, part 76

SEQ ID NO: 301568 - DNA, 83257441 bp, Homo sapiens (residues 78,987,860-81,122,666 of 83,257,441)
  source 1..83257441: mol_type = genomic DNA
aggaggttaaggcattcttagtcactggagacagaaggttggcacaagatacaggtcataccttgctgataaaacaggctggccgggcgcagtggctcacacctgtaatcccagcactttgggaggccgaggcaggcgaatcgcgaagtcaggagtttgagaccagcctggccaacatggtgaaaccccatctctactaaaaatatacaaattagcagggtgttgtggcgcacgactgtaatcccagctactcgggaggctgaggcaggagaatcgcttgaacctgggagtcggaggatgcagtgcgctgagattgtgccactgcactccagcctgggcaacagaatgagactccatctcaaaaacaacaacaacaacaaaacaggctgcagtaaagccggctaaaacccaccaaaatcaagcggcgatgagagtgacctctggctgtcctcactgctatgctcctgcaagcaccatgataaatgccatggcaacatgaggaagttaccctctatggtctaaaaacgggaggcatgaagaatccaccccttgtttagcatatcctcaagaaataaccataaaaagggacagtcagcagccctggagctactctgcctttagagttgctattctttattcctttacttttttttttgagatggagtctcactccatcgcacaggctggagtgcagtggcgcgatctcggctcactgtaacctccatctcccaggttcaagcgattctcctgcctcagcctcctgagtagctgggattacagacatgcaccgccacgcccagctgatttttatatttttagtagagatggggtttcaccatgtggtcaggctggtctccaactcctgatctcgtgatttgcctgcctcagcctcccaaagtgttgggattacaggcgtgagccaccgcacctggcctactttcttaataaacttgctgtcactttactctatggacgtgcccagaattatttcttgtgtgagctccaagaaccctctcttggtgacctgaatcagacccctttccggtaacattctaatttttgattattgctgaatttggcttgctaatctgtgctaaggattctttttttattttttatttttatttattttttttttttgagacggagtctcgctctgtcacccaggctggagtgcagtggcgcgatctcgactcactgtaagctctgcctcctgggttcatgccattctcctgcctcagcctcccgagtagctgggactacaggtgcccgccactgtgcccggctaacttttttgtattttttagtagagatggggtttcactgtgttagccaggatgctctcaatctcctgacctcgtgatctacccgcctcggcctcccaaagtgctgggattacaggcgtgagccactgctcctggccaggatttttacatctatgttcatgagggatactggtctgtattttttttttttgtaatgtatttttctggttttggtatcagtatagtggtgccctcataaaatgagttggaaaagtttcccaactcccagaatcatggaagattttgtgttgctttcgtattatttctcccttacatgtttggtacaattcaaaagtgaagccatctgggccaggggttttcacagtgtgacggtattttatttttgctttaactcttttaacagcatgaagggataacttaccttgagatttatcaatttaaagtgtaccgtgggccgggcgcggtggctcacacctgtaatcccagcactttgggaggccgaggcgggcagatcacaaggtcaggagatcgagaccaaactggctaacatggtgaaaccccgtctctactaaaaatacaaaaaatttgccgggcacggtggcgggagcctgtagtcccagctactcgtgaggctgaggcaggagaatggcgtgaacccgggaggcggagcttgcagtgagccgagatagtgccactgcagtctggcctgggcgaaagagcgagactccgtcttaaaataaaataaaataaaataaataaaataaaataaataaaataaaataaaataaataaaataaaataaaataataaaataaaataaaatagtgtaccatggctgggtgcagtggctcacgcctgtaatcccaacgctttgggaggtcaaggcggatggatcacttgagatcaggagtttgagaccagcctggccaatatggagaaaccccatctctactaaaaacacaaaaattagccgggcgtggtggcgcacgcctgtaatcccagctacttgggaggctgaggcagaagaattgcttgaacctgggagatggaggttacagtgagccaagatcgtgtccctgcacttcagcctgggagacagagcaagactccatccccccaaaataaaaaaaagaaaagaaaaaaagtatactggaatacaggattaacacgtggaatgaaagaaactgaatctcgtttttttgtccagttgaggtgactggagagtcttccatttgcagatgagctgtgtgccggacccatgagtgtggagccggcagtcactgccccacgagtcccgcatgtcacagcttcttaaacagatggtcaagagcttacatgcggttccttatcccaacccgccgcggcccgatgcgccctggctttttctggaactgttgttctgtggatcctcgccgagaacgcccagttctccttgctgctcagtcatggagtctctctggggaccccgctgccgcgctggtccttctgcagaggccgcctccctgcagcgctgtcttggtcaggctcccagcaggaaaagacgacacccgaatgaagatcatctaaggaggcttcagtgaagggaccatttaccacggatgagacagcagggcgtgcgggcggcacgaggggccgctgtagcatctggagctgctaacagtggagctgtcactcccatgtcacactcccaggccagaagagaccaggggaggggactcagcccagacactgggagtggcaccagggggctgccttgagaggcgagtgccagagagagtcagggactccccaggggccatcccagagggcactgaggaggttcactgggtctgggacccggaggaggcggggaaggagagtgggtctgaagggtaaggggtcgatgtgggtgcaattgccctttctgattccgctctcccggttttctgtccctctctggccgcccctgtcctgtctctagttgaggtctttcttggccagtgcctgcctccctggcgcctgtggtttcagtgatggggattcttccatgcgtcacttggagcgacctcgtctgttcctgtggactcactgacacactaaagacaccagctcagccctgacctctcacctgagcgcctccttaccaagtcatccagatggctccccagggatgagcagcaacaaaacgggcacgtgggtgcccagcacacgtcaggtgatgttctaagccccttgcgcgtacccagtcacttaccgttcactgcagccccgggatgagctctgcgatgagcatccttttgcagacgaggacactgaagcacaggaaagttaggtcatttgcctaaggacatgcagctggatggggacagagccaggatcgggcttgcagtggcttcagaccccacctttctgaccacagcgctcgtgctcttggagcgccttgagatagtgggacaaggcggactggaggacgcagtttccagatgggatgccctggcgggcgactcccgtgcgcatgcccagcatcctgcgcaggcgctctcgtggccaggcctctgcaaacagtcagcacagaccgggagacagaaaactacactccctcagacgctttattgtttacaaaacagatggatcccatagggaaggaacacaatcattatgctgacagcagcgaacagagaggggaagaaaaaaggtgagctttaaagtaatcgcaaatcactgcctatgcgaagaggctgcttccgggcacctgggctgtgactcaggtgctgacatgaatacatcagcaaggtctcaattcagccacagtcccaagtcccccaaccttcctgattgcatctctattttaaatgacccagcctggacatcaaggacaatgatctaggaggcgggtcaaggagacagccaggcaaagtcagaacagacttggggcttccaggctatgcccggtgacagctgagctcttcagaaatgcgtcacattcagcgttcacttccttcgcttcctccactacctatgacatagcgggggaaagagacaaccatgagagaggggtccctcctcgctgccctcctcgcagctgtgcttgagtttcaaagggggagaggtttgtgagggaccggcacagggacagccagagccggcaccctccggcccaccgtggcacccctgacgatcgcggggtggggtaggagtgagggtgggggtcggggtgaggtagtgctgtggggagggcactgtgaatgatggaaacgtcccttctcagcctgggtcgtgcctaacctgggtctcaaatcccactctgccttcaccctggagtacactccagcgaagccgaggcccagccaacgctcgtgaagtttccacagagaagagcctgcaaaactcccactggaagaggagaaataaaggccatggaaagaaaccccagggaagagacaggcctcgttcacagaccctaggcagggaataaaaaattcaagtcattcacagaagtcttgaaaggcatgaggatttctgacagttcctagaaaaaggcaacattttctttatctttgtatccattggccaagaacgccgacatgtgagacttgcttcaccagccgccaccgcttccttacaatctcccgcactgctggagcgggctgggtaactacaggactgtgctctgtgtgataagatttggtgattccactttataagaaaggaaactgctttaattaaagcaggttaataattaaaacttcaaagtactgcacagccacagaattttcttgaagggagaaagcggtcactggccatatgatgcggagatggttttatctgaggcctgagaaccaacagatgtgcctgcgccctggcctgtgcagctgtgggcagatgtgtccccaggggcctgccctcactcgtgaccatgcaataccctgcaacataaacattttcttttccaaggatctgcaggggtggacatgatgctccaggcacagagtaggaagaaaagggggtgacctggggttcccagcaaacaggtccacctcatgctcactgcgttctcagggtgaggcatagggcctgacatatggtaggagctctagggatattcactgaacaaaagaacataggaaagaaaagaaacgaggtcggatggaagaaacgacccagccagttaggcaggccttgagtcaatgcctgaagtgaccgaaatcaccaccagatggcagcatggaaagcagttcagaccgcggcctccgtggggcccgggggtccagtgcccgcaccactatggggcccgggactgggctccctgtccagacctccaacccaggcacagttccaaaaagaacaaaacaaaacaaaagtgcactcctcttgtttttataaaagctgagtcctgatggccttgctcagtgtttccgttttgagttaaatgaactcgatgccttcgtatttcacgcttccgatcttggtctccggcaacaggaagcgcccgtccagcgtgaaggccatgatgtaggaggcgactctgccgctgtcctcctcggatttgagggccacaatgatctggtcgtcggtgttggggatgaacttgaaggacgagaagccgtgagtggggaccaccgccccgacgtggctcacagcgatgtcgccgaagtcaggggaggcgctcagcagcaggttggcgcccttgcgctcgtcgtccttctcgctgtagcgctcctggctggcgcggcgcggcaggaagaaccagcgctgcagcgtgtcactccagcaggcagactcatggatgaggtagcctgggaaccgggtgaccgcgggtcagacacgcatgcggcctggtgtgcccagccccacaccatcaggccgtgcgcagtagcaggcaaggggctgcgaccaccagggcccaccagctcacagcaacccgcccctccctgctctccaggattctggaaggttctgtgttctcggttatcccatgcagggaacctgcagcacccgctcccttgaagcctcctcccgttccaccgagagctgcctgtgagctgcatcagggatttgggctcatcggagcctcctcggggctgatccagaggaacccaaggaaagggaacaaacccccattggatgtggggaggcatcggcggggaggctgccttgaggctgcaaggaagaggagacagcgtctggggccccaggcacagactcagtcacttcctcctgaacctcaggcacctaaggcctactccatcctgactagggggaggccaaagtgctgctggccctatgttggtgtggaacaccacggcccagcgccaggggtagggacagggcctgacccaccagtgcagacaaccgggccacaggctgggatgctaggaggccagctgccagggcgagtggggcaggaaagagaaaacagctcatttgccgccagaatccactggcctgagggaagccaccatcagaggcaaccaaaatcactaaaatcaagcaagaaacggccttggaggctgggtgtggtggctcgcgcccgtaatgccagcactttgggaggccgaggcaggtggatcaccagatcacccgaagtcaggagttcgagaccatcctgggcaacatggtgaaaccctgtctccactaaaaatacaattagctgggcgtggtggtgcacacctgtagtcccagctactggggaggctgaggcagaaaaatcgtttgaacccaggaggtggaggttgcagtgagctgagatcgtgccactgcactctaaccggggtgacagagcaagactatgtctaaaataaaaaacggttttggaggcaaatgcaggaggaagcaggttcccagcgactgggctgtggaagccacactgtgggctggggcaggcgtctcttacctggcggctggatgccggcagcagcccgcagggcgttgtagttggacacccagttctcgtggtccacgctgcccttgtagcccaccaccttcacccactccgggttctcgttcaccacatcacccgtagtggtcgtccactccttgcccaggccgcccacgtacagacgctcgtccttcactgccagccattcggccttgaagcctggccaagcagagtgtccttaggccccgcacccagctcccgccgcacccctgcacctggctcccacccggccccgcacctgtccttagaccccgcacctgactcccgcccggctccacacctgcctcccctccggcccgcacctggctcccgcccagggccggccggctgccctcccctcagctcctgaaggttcagtgaccactctcaagtctcctctgatccccaactccccgctcctcaagctgtaaccccaaccttaggattatccttaaaggctagaaaagctgaaaagtgacagcactctgaaggggcacgtgtgtcccaggggagtgcgggtgctgccctcggccacacctgaggtctcaccgagcatcactctaactccagtggccggagaggggcttggtgctggggctcccagtcttcctttcaatggatttgttcagaagctgtttttgctttttttaaactgatttatttaaaataagcctaactttgaaggctgccacagttcaggctgtgtgggagcctgtgttctaccgtgtattcttatcatccctacaccctggtgttctaacttctgtttgctttccccaaattttgccagcttcttgcccctgagagctggagctgtgccctctgaactgcccgagactgtagtagcttctctgcagggccctggagggacctgcggtctcctggtctgcttgtgcgatgagacattctccatgccagggtcttccatccctcccggatgacctgagtacagcccaaccccagagctccctgtaccccgctttcctccctatccaagggaaggacagaactacactagggttgcctaaaaccctgacaagtgcgaggcaggaagtaggcgaccaacgcctcagttgatacctcaggtgaggtccgtcccctgcccagccctgggcaaacactgaagattttatcaccgggtgtggggagggcctggccggccatgaactgtgtgggccgttgtttagtgcagttcctccttgacctcagaaagcctgcggtggcatttagctttctagaaggtggggatccaccgccagctcagacaaacggagctcagaggagctggcagctcctctgccagcgtccttggcacctccccagctcctctctggaggaagacactggccaccgtgcctccccaaagcctgtccctgccctgtggaagcagcacctcctttctggtgaacaaaaaggctggcatcaggctccactccaggggggttggcacagctcacacatgccctccccctgctggggttcagggagaggagggctgggcagcagtttacccttcagtaacatgaaaccaaagtctgggttttgagtgagaaccatctgtccccatggctttcagggcaaggctcctggtaggcacatcctagcgtggtcttgagaacctttgaaggtgtaaaaagggcgtgttcccagaggctccgagagcagcagcggatacagccgaaaacatcttggagagattccccacgtctcccacaggcctctagcgataagctcttcctcctagaaactgctcagtgtgaagtgacagtaggctatgctcctggctaagggtaagggggccgcaggtcagagcaagagggagacgtgctccctcaccacatccctggcttctaggtgtgtgaattctttaccatgtgcctgtgtttgccagccaggccctgagctcccactccccacccacacctccataaaacctcagggtccagttacctttctccacggtgccgtcgccgtcggacagaatcacccagggcacggctttgctgccttcgatctggtagacgacccccgtccggtcatccacggagtagagtttcccattgaaaacaatcaggtcggatagctccatgcctctccccttctccgccaggtgggactccaggaccccatggtctttgtcccattccacggccaccttgtccccactgtctgacagggtcaggtagccctttttcaggtaactgaaccaggtgttttcctcttgggcccttgactctgtgtccaggtctgcgataactgcgattcgataccgaatcccagccggtgtcctttgtgggggagacagggggtaggtgtcattgtaccagttggcgggcgcctggccgagcctccagttgtgtgcattgtgggtggggggcctgccgggggccgggcggtgggagcagagcagccagaggatggcagcacccacaaagaacgtcaggatcaccttccagcgggggcggaagcgggggtccgcggccttggtcatggacgccagcacaggaaggccccccacactgatccggagggagtgcatagactcattccattccgggtgctcagacagctgcacgggcatcagcgtgacagacaggcgggacctgcacagccagggagggaggagaggagtcagcgcctccgcaagcccagtcacatcttagttccggaagctgcaggcgctggaggctgacttttccagaagaaacagtatttcactactctgtggccattcttactcccttggcttaatgaattcccgactctagattcccgactctagcagtatctttgcttactttcattcggcaagacgtgaagtctttccacagcaaaattactccatctcccctgtcccagctggcaacgtgggaagctgagtgaggaaggaagttccatgcaggctggtgctctgtggtccctctaaagagagaagcgcaggagagtcaggtgggaggggaaggctgacggggtgaagtgggataggatcatagacagggtacaggtctgtattttactcaaatgccacctcatccaggaagccctccctgactgccctgctgcagacatcaccctccgtccctgggtccttggcccttgtccccacctgacgttagagtattgtatacagttatcggtttgtttgtttctgtctccacctctgtatcctggctcctagaacagtgcctggcctggagcagacagatgtgcagtaaaggagtctccacttcctctgggttaggctcctgcagcattggaataccaaacacatccaaaccaaataaaaacactccttctttttcgtatctgttgttgtttttggcagtgtctgtcccctggcgcctttctattaatgcaaatgactgcagggaccagagtctgcgctgccctgactgcctggaggccagcgtgtctgtgccttggcgccaaagaactgctcggctcactgcggggcctggctcggccgcaggcctctcccagctcaccctccaccccaggcgtggctctgtggcagagccccagggtcagggtgctggtggcggccaggaactgcagcccttcactgctgtcgccaagcccacttcccgggcatacagcatgatggctcagtgcagccatggggcaccaggcccacgtctgcgccgccttggtgagagctgcctgtctctggacagccgccaagtgccacagtggggcgtggggagacagctcccggtgcttcgatcgagaacactggccctgggcagaggttccatatctctgccctccaactatagctcagtgaatcccggcctgagaagcttccctggctgggtcctccttgagaaaacaacaaagcagcaaacatgtgcctttatgggcagacgctgtcctccctgccagggcgcctgggaagggcttggggactccagtggctccgtgcaattctgggccccaaatatgtggaccacgaggccctggtgcacggcagccagcaacagacacccccaccagagacacccccttctccacgccgcagcctgctgggctgagaagatacaaaaacagggtgacaattccacatggaactttcggacagtcctaggttttagccccagggtgaggttcaaggagtgaacaaggcacatacgtggaacctgctgctcagagtgatcctcctaacagcacaggggggctgccagcagttcctccaggcccgcagggaagactccatgctccctttaaggggcaggcctctcaggaccccctgaggtggtcacagggctgatcaccggggccttcccggcagcagggctggggttccccgtgctggacatcctcctctgactgcatccaggccctgccccttttctagtcccaaggcctcaaaaccccagccaggcccaagaagtctccactgagctcgaattactctatcttacctgctatgccaatcccgcctacatttctttttttgtttttctgagatagggcctcgctctgttgcccaggcaacagtgatcacgctcactgcagcctcaacctctgaggctcaagcgatcctcccacctcagcctcccaagtagctgggactacaggcgtgtgccaccacgcacagcgaatttttttttttttttttttttttttttggagacagagttttcctcttattgcctaggctggagtgcaatggcacgatctcggctcactgcaacctccgcctcctgggttcaagtgattctcctgcctcagattccctagtagctgggattacaggcatgcaccaccacgcccgtctaattttgtatttttagtagagatgcagtttctccatgttggtcaggctggtcttgaactcctgacctcaggtgatccacctgccttggcctcccaaagtgccaggattacaggtgtgagccaacacacctggggcacagctaatttttaattttttttatagagatgaggcctcgttatattgtccaggccagtcttgaactcctgggctcaagtgatcctcctgcctcagcctcccaaagtgctgggatcacaggtgcgagcacccgcacccccccttacctgcatttctgacatgcgtcttagacatttcaagacacgagtcctgtgcagcttttccctcaagcctacttgctcctcgtctccccttgggaagggtagtggtgacgggtggccaccgtgtccacagtggtctggttcaagctctctcaggatcctgggagatgtgcttttctgtgtgaatatacacttcgataaaaacataaggcactgccaccacgaaaaacctgactggcctcatcctccgtcttccttcctcagcattgactccgtggacaggttctgtcctcttccatggcccttcctcaccatgccatgccggctgcctccctccacccctcctgcctctccgcccctgacactcccataccccccgccatgaagttgccctgccagctgccccccaccaacatcccctgacactccctcgccacctgccatgaagtagcatccatcagatggcacactcccagcttcagcggcttcctcaggtcctggggtgaacccactctgctcccgctcagccctcacactgtaccatctcctctgcctgccggctggctacatagacctccttctgtcccctgaccacactggccctggcagagcctgcagttccccctgcctggaacagtcgggcctgctcttcgcaccagcagctcggtctctcctacggggcatcagctccctgggaagacttgcccactcgccctccctcccatgccgctccggctctcccaccgtccctgcctggctaggtgattatttctgctcctggggcagggatctggccactgtcacagccccagcacctgacgcactgccaggcagggagcagacagtctgcacgcattggctgaagggaaagagatgccaggtgagccattagccacttcttcaacagcccctctgcactctaccgggggccccaccttaggcatattatgaacccacaacctggatcaagcaccccaaagatcgagctgctcagctgccacatctgagctgcaggcccgggaagacggtgcttgccagcacagaacaacggtgcctgcatagactgctgtcagacatcgtgaggtgtcgtcgtcaccagcccctggaacccccatgttcttccctgttcaactccctcagcactccggagagccactgtcctcaccttcaccattcctgtcaaatctccggcccacttctcccaggagaccactctgtggccaacttcagcagccgaggcccctgggtggggctcacacctgccactcaggtcagtccccccagccgccgggcacctgctcttctggttcctcccttccatccacaggctgccccaagtcgcccaccttgtcaccattttacctccagaccccacactcccacagacactcaactgctgctgaataaatggcgaatctgttaatgaaggaaaacccttccctgagtccccggcacctctgtcccttcccacccccgcccaggccccctcgcccaccatggtacaagagcacccacacctacaccctctccttccctctggctaatcctcagaagcagccacctgaagccttcaccagtggcaaacccagtgagcacattgtcagtgtccctcctcgaggcaggggggcactctctgtgggcctcctcccaggcaggtcttctcggcccccactgctggcagcccactgacctctcccagggcctgccctctaaggtgaagacccccacgcctttctagcctgacctagtctctgagcctcctcatccgatacccacaggcaccgcaaaccaggtcctcctcaggaactccctgtcctggcagtgccggccctcaggagccatcccaggaagcaattcgtcctaaccctcctccctccccagccccacgtgtcccacccagcttgagactcgcttcccttctccccatccacacagcctcggctccagttccatctcaccctgatgactctcagagtcttggtctaatgatctagaccaagcttgtccaacatgtggtccaacacaaattcgtaaactttcttaaaacatgatgagatgagattttttgttaagctcatcagctatcaatggattttatgtgtggcccaagacaattcttcttccaatgtggcccagggaagccaaaagattggacacccctgatatagaccatctgggctcagccaagggacttcccttggcctcagtttacttcccggagccatgctgatggggttagagaactgtgcacaggggctgactgctactgcttctcactcactctacaagtaccctctcgcctgctgggagggttgcaaactaccacccgtgggccaaatgcagtctcccgcctagtgtgtagatgcggcctgtgtggcctggtatgtggttgcagcttggtgtgtagactctgcctggtgtgtagacgcggcctgcgtagacgcggcctgctgtgtagtcacgtcctggtgtgtagatgtggctgattaaagccagctaggactcctccctggcatgctgagtctggctgcaccgttgagtggtcgcaacagactgtggaggctgaaaatactgactccctgtccctcgacagatccctggtcaagaccatctcaaatcaccctccacaaaactgacagaataatttttccaaaaagcaagtctggattccaagtctagtagatcccaatgccttccatctgaaggacaaacgtctcagcctgcagagaaagcctcagtgggtttttccccctgcactcccaggagcaggacctctcccaggtcgctgtgcaacactgcacgccttcctattccagactcctggcatctacaccgtggcacacgctccccacccgggaggctcatgtcctctgaccacatggaaccagaggtgtctgagtcccggcgtctctgcccctctggggaatcagtgtgacggaggcaggggcctttcctccaggagctcagcacagttggggagacagactttgaacagtcccgtgtggtcagtgttacctcgaggtcacgctgattccccagagctaacagaggggcagagacgccagggcctcagccacctttggttaaacaagggactgcttctagtgacaagagaactctgtgtaccttccagaaaattcctttaacttcagcaccagaacaccttcccttgggcttcatctctccttcaggaccccaaggaattattttattttgcaaaaaaatttcaaatcagatgcctttgccacagcccatgctggtgtatgagctaccactggctgccggggtgcctggctgccggcgcctgctgcaggcaagagtttgcatgttctttaaaaagctgggttctttttcgggggtggggggtgggggggctcttttgtttgttgccagccagaaacaacagaaatgaaccggcgagggtaagacacaagatggacaaagtcctttccagaaggggctcgtgtgaggcttctccctacacccctcaaagcttaagcagtttaaatgctcgctttattgtgaaaagattgacaaacccagtgcctgcagagtaatggtttgattttagataatcagcaacaagaggactcagggactacagcaaagtcatgggttctgtggccagccaggctctcctgttcagtggggctgcaaaccagctatctcccagactcaggggcctacagggacaggacccctgctgctgcctggagagcactcacaggagcactcacaggaggaataaccacctgcaaggcttgcaaggcaccacggaggcatctgtccatcccacaggacactcccagagcgcaggggagccaccagtgagggagctgggagttagggagcggggagttagggagtagggagttgggggggagttagggaggggggaattggggaggggagttaggaagaggggagttagggagaggggagttagtgagtggggagttagggagggggagttagggagaggggagttagggaggggagttagggaggggagttagggagaggggagttagggagaggagttgggggggagttagggaggggtgttagggagaggggggttagggagaggggagttagggagagggaggttagggaggggagttagggagaggagagttagggagaggggagctagggagaggacagttagggagaggagttagggaggggggagttagggaggggagttagggagaggggagttagggagagggaggttagggaggggagttagggagaggggggttagggagaggggggttagggagaagggagttagggaggggagttagggagaggggagttagggaggggggagttagggagaggagttaaggagaggggagttagggaggggagttagggagaggggagttagggaggggggagttagggagaggggggttagggagaagggagttagggaggggagttagggagaggggagttagggaggggggagttagggagaggagttaaggagaggggagttagggaggggagttagggagaggggagttagggagaggggagctgggggggagttatggagcaaggagttagggaggggggagttagggagatgggagttagggagaggggggttagggagaggggagttagggaggggagttagggagaagggagttagggagaggggagctagggagaggggggttagggaagggggagttagggaggggagttagggaggggagttagggagaggggatttagggaggggggagttagggagaggagttaaggagaggggagttagggaggggagttagggagaggggagctgggggggagttatggagcaaggagttagggaggggggagttagggagatgggagttagggagaggggggttagggagaggggagttagggaggggagttagggagaagggagttagggagaggggagctagggagaggggggttagggaagggggagttagggaggggagttagggagaggggggttagggagaagggagttagggagaggggatttagggaggggggagttagggagaggagttaaggagaggggagttagggaagggagttagggagaggggagttagggagaagggagttagggaggggggagttagggaggtgagagttaaagagcgaggagttagggagcggggagttagggaaactgtgcttttctctgtgcacacccaggaggcgtctccctgctgctgccctttcccaggagaagggctcaggggccacctacctcccgaggccatccccaggcctgccgctgcactctgagcaaggctataatgaagggagtggcgactccctggacagcagacagccaagagggtttgtttctccagcttcctgcaggagtggaataggacaggtggcagaaccagcaggtttactgagggctgccaggctcctccctttcaggatccaggcagggcaggaagccacatcatcctgttaagaggccgccacatcctagcccccacctccttggaagggacgggtaggcaggtggcaggtgcgccaaccccttatctctggagaagagctaccttcctttcccttcccacacccagagagcaggcaggcaggcctcagagtgcccactgtgttcactgccatggtaaagagcaaaccccactgacctacagactcttcagcacagccaaggcagaagccaaggccttcacacactcatgctaacagcgcctgagagaacacgggtggcgcatctcaaagaaacacttattaatgcctgctatgggccagactccttgaaaacgttacctgattcctgctttggcacttgcaaggctaactattgtacctgcaaattccacggcaaatctcctcgggggtgggcagtacaaggaaaccagaaaggaagaaggtcacagggagtctggttaggccatcctgcctccacagacagcacgctccttaaaggtcaagctcaggatctgactgacttctgcacctgtccccgcccctagtatccagcacacggcaggcagcaggcaccgtcctgtgggacagaagcctcacacgggccatggctccattctcatgcctcttccagcttctggaggcacccacattccctgcctggtggcccctcctccccctccaaagcccgcccactgcacttccccaaggctcttggccatcatctccctccggctcttctgcttccctcttctgttcttaaggaccctgtgattacactgggctccctgggaaaatccaggatcatctcactactttaaggccggctgatcagcaaccttaattcccctttgccatgtaatgtaacatattcacaggctcagaaggtaggacgtggacatctcggggagctgttcctccaccaatcacaggaggaagaggggaaagagcctccaggtttttccaagggccaggaccagtcactgtctatggtgtgggcgcacagcttcagaaccctctacggtttgcagttactgccttgtaaagaggctgtgtctgcttaatttgtatcatcgatgttacacctggaggaattttagccaaaaggcgaccttctcagttgaaaggcacattccaaatggcaccacacatctgggaaggtgtccttttccagagtgtgtgaaaataacgggatgggatcatcgccccatggacctggatcagggctgccttccacaccgcggtggcacctgcacgagcccacctgcttactgccaccttctctcctcacgctttcctccaggctcggctcccgggacacaaaggccgaatcgccaggactttcactcaacccggcaacaccctcagagccattctggggggtcccagtctcacctctgccccactcccacatggtggcatcacgcactgtcttaagtcttaagccagacttcaacgccttcttcacttcccataaaaccatcccagaggaacgcggggagcagcgtcctgcctgggaaccaggcgctccacatgaccactgcacgcatgacaaagacgagcagggtccaaaacaaaaaacagaacgtctccccaaacagacttctctactgccaggatgattttttcctaattaaccatcttgattaaagtaaaaggaaaatcaacatgaacattcttaagaattaatataaaagtttctaattcccttgatattggcatttcataagagctttccaggaaatctcgatagttcagagtgcactgagtgaaaagaatgaatgctgtgtgtccttggcatccctggtaccattcaacaaacaatagaaaaatgacctccttgtgatagtactgacccatttcaggacctggacaatagttccaagtctcagatcttctgtttttgaaagagaaaacactacagcatttatacatctacctatctacctatacggttgccagaaagtaccgagactccgaggacgggccatatgtacttgggggagcctgcacaggcacacacacctcgaaagccacatccaggtggcagggtaaaaacacccacagggccaggagaactgctgctaccacaccctgggtctcctcacgtactctgcagctcaggggggtcctgcagaccaggtgcacagtgacgggtgagtgaaaacgttctggagtaccaagagcttttacaccaacacatttactaagctgccatgggctaggaaaatatggttatagcctaaggggaagaaaggagacctctggcaatcagaagcgtcaagcctcagatgtgcccctccagcgaggtgtcccagggtccaggggtcctatcccgctgcgagtggagggttccctctaccaccttgtgacatgtcattctcttttgtgatcacgttaatttggacatgaaaaagtgacactagaagttggtccccacactgctgcggtggcctcatgacagtgcctggacaaatccatgcttcacctgagtcctggccgtgaagatgcctggggctgccccgacaggaaacccttgccacgtccagaggggagagggttggctccttcagtgtgcctttcagcaggggcgtgtgctaggatagagggctcattgaggccagcagggaggagcacctgggaggagccccactgccgttccacaggctccagccagactgtcctgctgagaggcctgcggtggggctgcagggagggtctgtggtccaggcctggagggacctttctcagcaaagctcctcagagggagagggaggaagagctgggagatagcggatcctgaagggctgcggcacccgcttccttttaggagccttctacgacctgacacttgtttcaagtttgggcccttacactggagagctagccggattcacttgacaccaagagcctcacatttccaaacctctgctttgttgaaaatgtggtaggaaaggccatagggcatacaacctcaagaataaaataagaaatggagctgggacactaagagacggcttttccaggggtcactaagggggaaaggtgtttgggagagagatgtgtctgctgatggaagagtggtcacaggtgctctgtgccaagcctagggtacacagagggcaagggaaagaccattcggagggagaagcaaaggcaccaggcaacatggactggcaaggaggtaccagtctccaaggatgagagaatccagaccggatggcagtaggggtgtgagacaggtatggtggggagggcgaatcatttgcatgcaggaagatgagagtgagctgtgtgcctggaggaaggctccaaattggatgagggcagggagagcaaggactgggatggggtggggaaggttggcctgttacaggtttgaccaagtgccagtcagagggagaaaattcccttatcagtccaaggagaccctgcatagaccagaggaggggtatttgaagtcagaaggtggtgggagggggtcattcccaggaggggtgccccacactagccagagcggggaggcgtcccacactaatcagagggggatggtccccacactaaccagagggggaggtgccccacatgaatcagaggggggtggtccccacactaatcagagcggggaggtgccccacagtaatcagagggggatggtccccaaactaattagaaggggggtgtcccacactaatcagagcggggaggagtcacataatcagaggggggaggtgcccacactaatcagaggggaatggtccccacactaattagagaggaggggtgcccacactaaccagagggtaatggtccccacgctagtcccagggatgaggtgtcccaaaagtcagagggggtggtgtccaccgcctgtcggaagaaggggactttcccacaggtcagagggcagagtcccagcccagtctgcgagtcagggggcagagatcccgcacgggtgggacgggaagggggcctgacgggtcagggggcgggacgcggcagggtcggagggcggcggcaggctccgggacgggggtccgggcccgtggctggggcagggcgccggcggccgcgggcgcagtcactcacccgctgcggggctggctccggtgcccgcgatcggcggggcttggctgggcttggctgggcttggctgggctaacggccgggacggaggaaggtggccgacttccgccccgcgcgcgctcgccccgcctctgggcccgcgttcccggcagcctctgctctgcggctgcgcgcggacggcgcgagggctgctgggagctgtggtttgtgtttttttgggttttttttttgttgtttttttgtgttttttttttccgtcctgcgcctgcgcgctggaggagcggccggctggctgcaggctggaggggcgcgagggtccgcactggcacatgagggccgtcttccaccgcgttgcgctggaacgtgggcccagcagatcttttggggtgggaggcattgaggggggtgaaggctactagggagggaagttctcattctccgagcgagggcccccttacatgggcctcccgaccctcgtagtcttgggaggcggaaaaccgtgggcccctttctgccatcctcattctcaggcagcccctctccttggcccttcaaaacagccgcctccagagtgctgctgaccagttgccaaagccaggatcagggaggtctaaggctgtagtgtcctggggtggggacggtggggtgtttccctgcaaaaaatctgcagttgacaaacctgccaaacaagggtctctgatttctcctttcccctccgtagccctagcccccgagatattttagggcactctgttaaaaggcttccccggccccgccctcctccatcccaaagttctgagaaaggcctggtggccgtggagcctctggcaggagagcttggcagaagggtgcaccagccccctgcccatctgcaccttcagctttcctgcttgataccagctacttcccccagctctctcaaaaccttccgttcagtaaaagatacacaagaggaggaattcaaattatataaatggtacgcaatgaaaaataagcctcccattgccgttctgtattccctgcccagaggcgatcactagatgttatatggtatccaaacaagtcataaacacgtatcttaaattacctttaactaaatagaaatgtgctaaacactgttatgcacttttggtttttgattttggagaggagacaaacctttcttgaattcattaatgtttcttgtcatgctaaactgagtcccaaccatgtctcacataatactcattattgtcaggcctctgagcccaagctaagccatcatatcccctgtgacctgcacatatacatccagatggcctgaagcaactgaagaaccacaaaagatgacattccaccattgtgatctgttcctgccccaccctcactgatcaattgaccttatgacaatacaccctccccacccttaggataatgtacttcgtgatattccctcacccttaagaaggtactttgtaatatttttcccacccttgagaatgtactttgtgagatccaccccctgcccacaaaaaattgctcctaactccaccacctatcccaaacctataagaactaatgataatcccactactctttgctgactcctttctcggactccgcccacttgcacccaggtgaaataaacagtcttgttgctcacacaaggcccgttggtggaatctcttcacatggacgcatgtgacaattatatttgaatcttttattttctaaaagatccacatgtgccttccagcttaagaaataacacattattcctgcatctttaaaactctccaggttcttcctgttctgtactccctgctacccccaagaggtggtagccacaatactgaatgttgtgttaatcattctgttgccttactttataattttagcacataggtatgtatccctaaacaatatattgtttaattctgtctattttaacctttataaaatgaaataaaactgtatgcaataattgagagatccagtggctctctcagaggccttcgaaccagagcaacaccatcttgaataagggctgggtaaatgagacctgctgggctgcattcccaggaaattaggcattcttagtcacaggatgagataggaggttacaagatacgggtcacagagaccctgctgatgaaacaggatgcagtaaagaagctggtcaaaaccctccaaatccaggatggcaatgaaagtgacctctggctgtccttgctgctaattataccctaattataatgtattagcatgctgaaagacactcccaccagcaccatgatgatttacaaatgccatggcaacgtcaggaagttaccctagatgttctaacggggaagaaccctcagttccaaggaaatctcctcccctttcccagaaaactcatgaataatccaccccttgtttatcatatgagcgagaaataaccataaaaatagccaaccagcagcccttgtggctgctgtgcccatggagtagccattcttttattgctttactttcttcataaacttgctttcactttactctgcggacttgccccagattctttcttgtggaaaatccaagaaccctctcttggggcctggactggaacccctttctgataacatcttgctgagaaaccatgaagggacaacactggagagacctctgacccaagggaaatagacttcagcaccagttgaccaactttgggtacatggtggggtattttatccagggtaatggatggaattgggttagaggcccaaattaggagagttagagtccctcctaagacacagggagttagaggcccctctttgtaaagaacaagaatgcttgttcaaacttgggttgaaggctcaacttcagaatgttagaggccacccttagtaagagccctcttggttaaaaatggattcagcactgcaggatgttaaccgccattctatttggattaatttgccatgccctctttgctgatggctgtgggtgacaagattaggcatgtgcaggatcatgggacctggggagctttttttcctcccccaaaggggaaaacttgagagctgatgggactgctggaaaagatccctttttgacaagcagctgtctgaacttttgattcagtgtcactgtgatggatgggtctttctctggcttctgtgagctcctcacctctgcaacccaccacaggcaacactcttctcccttccctttcctctctctcgttctcgcctttcccttgtctgtcttctctgtcactctgggtgatgatctactcttccatcttgcccaaaaaccacctgttgaaactcctggttggcagtcattccgcccccactttgaatggattaaacactacaggggccaatgggggaagttttgagccttgccaggtcgatattgggtgctgaggggggtggctagtgtctgtgttttgtcaagtgcactttgttctggccagaatggaaaatgttgattcgattcctccatgcaacttgttgtgtagcatcttgcaaaattgagaggcttttcctatggttccatgaaatggaaaagggtgatttttgctttgcgatgtggcttggcccccacagttatggtgctgtgagcagggtcacgagggctgcttagggaaagggatcccagaaacctggcatgctggcaaaagggtaagaatttcttaccagtcaggcctttggtctctctctctctatgcaaaccagttgagtgaatggtaaaaatcactgtctcctctgcaaggttttgatgaatgggaaaaaggatttgtgaggctagtcttaggctgtgatgaatctggtgtactttgtgctatgaatttggctttctgtgtcattctgtcataaaaggggtatcataggatagaatgtggccctaggacccctgtaagcccactattcaagctggcccagcaaactggtcagttgacaactttgcttcaggtcactgaaacaaaaactggatgaggattccccctcgtcttgttttatgtccttgggagcttgacttgtgaccatggaggggtattttctcttggtctgtaccatccctgtgagtcatgttttacaaccaaaatatataaaagagctctatttaattggcttaaataaaaataagcacttaaataaaatattttgccagaaaaattaaaatgctaatgcctttttgttcacatgactttagtcatctttggaaaagcaaggcagttttaaagattattggtaaaataaaaatgtctttgaaatttagacatttggtctaaattaggcaggtcagatactaggtttactaaactacttctctgacttttgataattgttcaatttaccttctttggagccattagcgtctatgtaaggcctgggaacatatggagttagccatgcccctagctatgctggaaggggtcagaccttatctgcacttttgtctggtgccccaagctctacacctggtacacaaataaaatcacttaccaaatttttcgccaaaaataaaagttgctaagagttaacattgtaccatatgtaactgaggttactggaggaacacttttacatgcacagtgtgtaaggaaagtataatgtgtgtttggtaaaagattataagaaggcatgggaaggcagggtgtttttgcctggtttggaagtttaaagagttgttcttagataggagaaagcggaaggtctaagcaagtcgtggaaggtttgtgaaagtctaatcttgtaaaagcaattctctgtgttaacatattggctaaagttaaaggagtattatttggtttttccataaattgaacattggaataaaagcacaacagggttttcttagagcattggtctactctttaacaaaaaaaattgtaaagggttataaaagctttatgaaaatcttacattatggtcaaactgattgaagttaggaaaatttgtctgtaaagttttactaggaattgaatttgacatcaatagtacactcatgcaaagatgaaatttggctttctctcttgaacaagattttcatgtaatattaaaagataatgaaagatttttgtttaccttttaaataaactacaggagaaagaagggaaagaaaagattgtttgaagagctaaatcttccctctatcaatgagtaaagccttttgccttttttaaattgttgagttaacattttggctaaataaatgacttacagtgacctggaattttatgttataatatcaagtgttttaaacttttgatatttgacgaactttccaaaatcagattctaaatatgtctttttctgacctgattaatcattttagatggtaaaaaccctaaagtccaaaagagacttatttggcttatttggtatattaaaatcatacaggaagcattatcaagtatgaaatggtgtttggctttctttagaccatatttgtataaatatattattggtatgcattctaaaattatgggaaattcctataatgacctaggtgtatgttattggtgacttagtgtatgttatcagtaataattataattgttatgtaaaattgtatgctacagaagtaatgaaatttccttgtcaattgcatctttgactgtggctatcctaagacttttttgtcattcagagacaattattgtcttgttttaatcctcttcaaaagaaggtttataaccagctataggatgctgacaattactcttaaatgcgagtgtctgataactttggaaagtgtgccattaaaatagagaggaaaaaaaagcttccaagactcttttggaaagctaatgtgttcttaaatattgagcaaaacagaaattaattgtatagactaatgaaagactgaaataatctttttacgactttttgcataaaatattgctgttcctttctgttttgttttccaagtcgagcaaacttttttattttttattttttttattttgagatggagtctcgctctgtcgcccaggctggagtgcagtggcgtgatctcggctcactgcaagctccgcctcccgggttcatgccattctcctgcctcagcctcccaagtagctgggactacaagagcccgccaccacaactggctaattttttgtatttttagtagagacagggtttcaccctgttagtgaggatggtctcgatctccttacctcttgatccgcccgcctcggcctcccaaagtgctgggattacaggcgtgagccaccgtgcccggccaaacttttcttttgaactctttacagcttttaacagttgagtaaaatacactcctgtaaacaaaatttggagcatatttctttctctctacctgatttctccaaaaattgaaaactatttgtgagtattcttaacttatggctatatattaatagttatttgcataagtgcagtaagaatctgttttcttttgtaacaggacacaattggagaaattgggttttactaaggctttgaatggaatggcgtgctttcaaatataaaaaaaactgccttaaggaatcaaagttgacttatagagctaataaaaggcccttggaaaaactggctttataccttgtctatgcagtccctgtacagggttcctgccatgtggtaagtaaagaatgtcactttgtgacaggttcaggagccctaagttatattgggactttgagacgagagaaatttacctaactcatacaggtatttgaaggcataaacccatggctgggcaaggctttaaaaagtcaaatataagattccttatggaacaagattccatcaaagccatttttttgtaaaaagagcctatatggtgaataattattcttactgcacttcatgcaaatgatcatgccaagtataataagactaaggtttatttttcaaacaaataagtcctaccattatttgtttttaataaaaatggggactggagagagaaaaattaggtttcaaaaactatggtacacctgttattagattctagtctcattcattgttttttttttttttttctgcagtctagactgaccctgcttatttctgtgaaccaaccagtgatctctggccatggctcagaacaaataatagggatgggtaacataagaaatatctggatcagtattctaattcagggcacatattggaatctgttagcaaccccatatcagcttagttccaacagttgcccagttgatggaatgccttatttaatttatttgggataaagtattaatccattctcacactgctatagagaaatacccaagactgggtaacttataaagcaacaagatttaatggctcacggttctgcaggctgtacaggaagcatggcagcatctgcttctggggaggcctcagggagcttttagtcatggcctaaggcaaagggggagaggcctcttacatgacaggagcaggagaaagagagagagcgaggaggtaccatacacttttaaacaaccagatctcacgagaactcacccactatcatgaccaagggggatggggccaaaccattcatgagaaactgccccagtgatccagtcacctcccatcaggccctacctccaactttggggactataatcggacatgagatttggtggggacacagatgcaaaccatatcagataattttacttattttgctttactattgtggaatatattcctgttgtactcgttgtgtaggaatgcagaataagcttactcgccgttttcttaaattgaacatttgccagtcttccagatatcaccttttgttggaactcagagttatgaatggccgtcagtatgctgatgctttctgactgagttcctctctaccctgaatacaaaagaccttaatagttagatgagaatatcattactcctatttagcctgaagaagctacagaaggggaatcttcctacctctacaacccttaggattagtggtcctcttgtaaaaaggaggggggaaatatgtcagaggcattggaagcagagcaactttaacttgaataggggctgggtaaaatgatgctgagacctgctgggccacattcctgggaggttaaggcattttaacctcccgggatctgagatgagataggaggtcacaagatacaggccacaatgaccctgctcatataacaggatgcagtataaaggctggccaaaacctgccaaaaccaagatggcaacaaaagtgacctctagttgtcccaactgctcattatatgctaattataatacattagcatgctaaaaaaacactcccaccagcaccgtggcagtttacaaaggccatgggaacgtctggaagttaccctgtatggcctatgacggggagaaaccctcaattacaagaaattcttgcccctttcccagaaagctcatgaataatccaccccttgtttagcatatgatcaagacataaccataaaaatagccaaccagcagcctttgggggtgctctgcctatggaatagccatttttcttttcttttctttcttttttttttttttttttttggcacagtgttgctctattgcccaggttggagtgcaatggcgcaatcttggctctctgcaacctccatctcccacgttcaagtgattctcatgccacagccttctgagtagctgggattacaggcatgctacttgaacaggggctgggtaaaataaggctgagacctgctgggctgtattcctgggaggttaggcaggaataggggtaaataggggtaattatatttttagtagagatgggggttcaccatgttggccagggtggtcttgaactgatctcaggtggtctgcctgtctcggccttctgaagtgttggcattacaggcatgagccactgcgtccggcctcctttactctcttgataaacttgcttgtattttaccctgtggacttatcccaaattctttcttgctcaagatcaaagaaccctctcttggggtctggtttgggaccctttccagtaacagctccacagacatcatcagatggcttaattttgccaatctgatggtaatcagtgtcttctccttgcctgattactgtgaggttgtatatcttttcttacactttttggctgtttacgtttctttttctgtggattccccatcatcttgtgtgtttttaggaattgatccatcccatccccattgatatacgtgcaatgccaattttgtcatagatcaagttttcatacacacatgggtctttgtcgggtgggccttctatcatgttgaactaatatacttgatcacatctgttccaataccagtatcttcattattatgtctttataataagccttcctatgatgtaggacaagtcccctcctacctcacccaccttcaaccttctgggattttgaatggaattgcttggaatctatagcttaattgagcgagaactgagtttttttttttttttaatgatattgagtcttctatctaagaccacgctttgcttttccatttctttggattttctttagtgcttttcagtaagggtttgtaattttcacttcacaatatagcttggagattgttccagatcacatatagagagctgtttattctctaaagagctacacggtgttccactgtgtggaatttattttaccaggcccctaatgatgtcctttgagggtatctgtgctttttttatactacggcaatgcttcagaggatatccttgaacttacttatttgagcacccttctaagtttatctgtaggagaaactcctagaagaaagattagggggtcaaagggtatttgcattctgtgagcgaacacaccctcccttccagagaggctgtaccataaaatcactttccttaaggtcaacaaatacaatcaggctttcattggattttcattctccttgtcttctttgcatcctcagagacttcaccatagactccttttggaaattctctttagtttctgtggctctgcataaaggacaagacattctttattgaatcattcattcatatgttgacatgcatttactcactcatttcatagttaagtgcttggaactggggagtccaccagggggccctcccatcttatttatcaagtaaaatattgcctagtcgatcagtatatgcctgtctccatgtaactgaaaacattcattgccaaaacaggagagtaaatattcagaggtgaggaaactgaggcatagggaaattaaatggcttgatagagttgcaaggcacacgtgtacatggcctcaggggagacttctgtggaaaggcatggcttcctggaagagggaacgcccttaccctcctggttttctgcaggtgtgaggaccataaagaaacctattcacctggtgtgtccttgcagctgccagtcctgatctccacctgtcccaagctgctcagaacgtggcagcgccatccaggagccacgagcatgggccagtggccagggaggctggatctgtctgccaagtttccacttttccatcttagcagcttctccgaagctctgtggagactctccccactcccaccccttggcagtgggacgtcaccatcggagccggccggtcgctacccttgggaacagaattcaaagtttgcaataccaatctctgcccttgtgggatgactgggcagcccgacccaaaatagctgggaaaggcgggatgttagggccgcggtgggaaaactcacagtgctgctaatgacatgctgtgcttatctggaaccgagtgtcttgcagactttaactgagatcacattgctttttccagcaataagtaaacagacccagcgagtggtggtgacaggcccagggagagagaaagaattaccaaatcagggagggcacagaacgtgctgccttccctgccaggggttccaggaaatatttcttcccattctaggatctacccttgactaagaatatgggatgatttgggaatattcaggaagcctttaggggttttgacccagacaccttgtgtagatgtgagctcctagggagttttaggatgggtttgtgggggctaagagagagaccttggggaggggactcagtctttctggaagttggctttgacttctgacccataatctcagggctgatgaaatcccccaggcactgtggctgatttttatttttgatttctgttgttgttgcccaacaggaaaggattttgccaaagggaaaacactctgcctcttgttgcttgggggcacctaaggctgagaaggaagaaaatcagccactctgcaaggacatcccttgcttgccaaagtttccatctttcctacttaaaattacaaagcagaagtgaagttgatgacaaagagcattaggaacctggcatgctctctattttggattttttttttcactttattgaggacaagcttgtattctctgggagctggccttgtgagtctttgcccattgcctgctgccttgagttgtgagccatgatggtggcacctaagacatgtgctcagacctcaactcctattctttggaagttcccatgcctccgagccttgggtctcacacaagatcttgggaaaccccaggctctctttgttaccgtttgataccactcctccctatccccagtttctgcctcaaggaaaatgagtaatcccttttctaatctcctccttccctcctcttcccaagaggatggaaggaagattatacttgtaataatggtagttgcaatgaacaatgtgtctgttccaccaacctttttattaatcatgtgagaagctacaggttcacaatcacttctccaaaatccctgaaatgcaaaaaatctgaaaccttagtttttccctaaagttggcacacacaaatttgacagaacaatgtggcttgaactatcctgagactatggatgccttcatcccactgccgaatattcaagtgtttaacgaaggggcgctgcccgaagcccactgggtaagatgctttgtgggatatttgcatctgactctgaacatatctgacctccttggttccagataagagaccctggacctatctctgctttgtagataaggaagctaaggcccactgaagtttggtagcatccccaggctgcctcaaggtaggacagagccgggacaagacctcctagtaggatgagccaggtgcacctggaagagatgaccagccttcagctgtctttctagaactttgcactatattgggcctctgagttctgtcttggaattgtgttaaagataactgttttccagttcttcaacaccaaagccatcttggatggggtaaagagaaagaataaatattccatcatccacaacttttttttttttttttgagatgggggtcttgctctgttgcccaggctggaatgcaatgccatgattagggctcactgcagccttgacctcctgggctcaagggatcctctcacctcagcctcctgagtagctgggattacaggtgtgtgctgccaagcccagctaattgttttatattttgtagagacaaggtctcactatgttgcccaggctggttttaaactcctgggctcaagtgatcctcccgcctcagcctcccaaagtgctgggattaaaggtgtgagccaccacacccagcccatcatctgcatctctttctctttcaagctgtgtgtcccgctttgtgaattctggtatctgcccacgactttcctgagtctgaggctcccaggcagggcaacaagaagccttctcattgcactgagggatttcctagctcgtaagagttctagaaagtcccagattctctgaagtatggacgaaggtctcataagggctgcaaaaaatgctgttgttttctctggtatccctgcaccaagggctatttgaggacagagtaactaaggaaaggtcagtccgtgtgctaagccttgctcctggtgactgggaaacttcctcatgtcacttacaggaatggagacaagcttatctctggcttttcctgtatcaataagcaaccagggatgtaggttttgccaagcctcagacacgtatgccaagaacacaagcaacccctgatcttctaagcctagcggaggctgcatctctagttggttaagtagtgttgacttcatatccccatcgtgtcctctgagttccccctgggtgctggaggcctggcagcctttctccctgtactcacaggaggggttgacgcatgcagtcagggcctctgtggagtggcttttgggcgcctcgcctgcccggaagcctccccttctgttctcatctccatttgtcctcagctctacctgagtgctggcctcgcccagcctggggcaaggcagtgggcattgtgcttgcaccctcttcttcctctcctttttgattcttttcatctgtccagttgttggtgcggcggatgggaggacactccaggcagggaaaggtgaggcctcttagttttgctctgaatgtcccaaccagcatccccattttcgcatctcctgtttgtccagagacagaccctcacaggagggataacaaaacaaaaaaatccagctgcaacatcgaggtgaggggcagctcggagagaacagggcagaggggggaaaaaagaagcaaaaaaagggggaatgctgttatcatcagagctggcttctgcttctctggccaaatccttcccctgctagtgatatggtaagtttccagagcaagctgggctgacgcagagtctagggatggagactgggtcccaaccagggccggctctggagcagcctggatcagggatcaggatgggagggcagcctacgggccttgttcagaaaaaatatttgtgtatgactgagaaaatgtcaggttttcatatcaaggaatgagaggcctgatagagactgaggagtgcttccagccatcctgggctcaccactgtactcgtgctgttctctagaaaatggaaatcttcccggcaggggctccttcctaacctttagatcacagagctctcaagactctgaacaaaacagtggaccatcaccttccaaaggtgatgcgcgcgcgcgcacacacacacacacacacacacacacacacacagtttggcattttgttatagggggttcacagattcccccaaacctgtctgagtccccgataatgcacagggcgtctcaggtctgccactgtttggagacctgacccctcagggttggccacagcggatcccggaggccttggggctcatccctctgctaccaagtgactaggagcgctcagccttgctgggcacccccatcctgcggggggcattctcgtccggggctcgcagcccctccgcctctggacggacctccagactcacggaatctgccccacccccactctcagcctggcgggctccccagggggccgggaggaggcggccgctggatttccctgaggcgcggcgcggggcacacacggttaatcctccgcggctgctgtttggacgaaaagcgctgggggtgttggaggctcctcgctgctcacatctggctgggcttcgctccttgcgcgtctgtcccactttctccctctcttcctttactttcgagaaaccgcgcttccgcttctggtcgcagagacctcggagaccgcgccggggagacggaggtgctgtgggtgggggggacctgtggctgctcgtaccgccccccaccctcctcttctgcactgccgtcctccggaagaccttttcccctgctctgtttccttcaccgagtctgtgcatcgccccggacctggccgggaggaggcttggccggcgggagatgctctaggggcggcgcgggaggagcggccggcgggacggaggtaggtggccgggccgggggacccagcgctgccccgccccatcctcgtggcttcagcctggtggccagggcggggatggcagacacctgggccgggacggacggagagcgccgtgggaggggccggttggcggtggcggcgcaggggcggaaagacccgggttttcgggggcagccctggcgtctggctctggctcagcccccgccataggcgcctttgcgcgggggtcataatggtcccgggtctccctgactgtggaggagcggggcttttctgcacgtggatactaacgggaggaattgcaccttccccctagttttttgtggggtgtttatcttgtttcactgttctctggtgcctttctgagggtgtggaaggaagaggaatggtactaatgcccgcggctgcacctggcggggatgccctcaccccactccttatcactgggaccacctgaccgccgggtctgtccagtcctgtctgtggccaacctggaccttcacggaataggaagcgctgactttggccccccgcatctgacagccttggtgtcctggagggggtccagcttgggcaggaaaaaacggtgttgcttccccggggccctcctgggaagcgaagctgcctgtgccgctgggagtggcccccccggcctggggctggagcctctgagccgccctggggcttctggacctcgcaggtggacccaccgcccaccacccagccctccatggcttctccaccggtgcaggtgtggtccccactgttagcccgggcctcgcggggccaatacccgggccacactcttccagccccagaaagccagattatcttctctggaccctccgcgtgcttcaggcacccttgggccgactcatccctgcttgggagggagggaggaagccgcccccctctgtgaggtgttcctgactcttctaccccacctagtttctaggaaaggaggcaacatgacgtgctgggagctttctggtcctgagctttgaacatgagaaatgccgtgagaaactgttttctccaccgctggccacttcacagccccaggggagcatgtgatgtccttacaggctgcccggcctctgctttttatagtgcaggaaagtacacactccctggcaggccgtgcagccatgaacagccacagatagacgcacttggctgtggtgtgtgctgcagggagcgggaggacatgggaggacgtgctccaggaggcctctccagcacctgccaaccggggaggagggaaccaagacagggagatgggagccgaggtctgaggacaagcagaagcttccccaccctccctcttagagctgcagagctggagaggcccctagagtccacccaacaacaacagtggcaatcatcatcaccatcatcatcatcatcaccatcatcatcatcatcatgatgtcagccacaggtttgtgtgtctgcttctcacatggcaggcgctcaacattatattaataattataataattattataatagttaattctcaacacttctatcaagggaactctcacttgtggaaagagcagagctgcaaagctcaagaggctcacggcttgcttgaggtctcagagacagggatggaggactcaagactccaatctgtgtctttatcccaagtgcgtcatatgcttctttttttttttgagacagagtttcgcttttgtcatccaggctggagtgcaaggccaaatctcggctcactgcaacctccacctcccaggttcaagcgattctcctgcctcagcctcccaagtagctggattagaggtgtgtaccaccacgcctggctaattttgtatttttagtagagactgggtttcaccctgttggtcaggctggtctcaaactcttgacctcaagtgatccacccgcttcaaccttccaaagtgctgggattacaggggtgagccaccgcgcctggcctccggggcgtatacttttaaccttcctatctggtgttgggaacatggcactcagctcgccaagctgatgctgggaacttctctctcccagctgctaacagagaatgcccaggggcaggaaggacacaggtccgctacccagggactctctacttctcctcccgcctccctctcctcctcttgtgttgccaagggtggtgtccccagtgagctcattcagggaggcaggaagcatggtgcaggaagccctaggtgggcgctgtgcggctacaggacaccactgcccctcccaggcaggtgcagccagctggcgagggacgtcctcccaagtaggagcagagaaagcccaagctgtcccaggaaggccatgggttccctccttgttcctaggaagtgaccccccttttcagggcaaccaggacaacagagtgtttttggaacatgctcctttctgttcttcttcctggtgcctccccccagctgtaattagcatgactcataaaccaaatattctggcattgaactttgctcatcaaaacaaagatgaaaagaatttcatagatacagttgtgcgcagggactggagcttcccatttgtgtcttgtcctcaggggtccctgttcctgggcgggggggggctgtggctgaggctccagaaccttagggaaggggtgggggtgacggacaccaggaagggcaggaagaagtagcaggttacaccatcccctggacgatcccacctctgcctgacaatcagtagcctctagagatgttcaagtgggggcactccctcatgggccacaggttgccatttcccctgttaacctgctgaaattggcctgctggtgtcaaatggcacaaggcagctctctggacaggaccctgccatctccctgaccccttcatacagggcaagaactcacctgcccactttagagagcagtctggaagaaacagcgacgtcagctcagctcaacaatgtgtttccttcaggctctcttggggcagcccagcaagccgctctcatgagccagggatccttggggccctgtcctggggtctatgctggggtccttggcctggaagggccagtcctgagcttaagcagggacatgcaggagcaggacatgctcactcctttcctccttcccgagccccgcagtgagatgctccaactgctgccgctgcagcctctagttctctgggagaggcatgcggtgtgagcaggaagggaggggcttcggagccatgtgggaaggatctttatctctgggtccttgtcaaggtcacggctgtgtgacacttgtgctggggtgatatgagtggctcttggcaaatcagcacccctccagctgcctgttcttgcctacatttgatttccagagctgggcttggcatctgaatgtggttcaaagggggatggtctccagcaggggcacggggacccccacagtccccactgtacaccagggcactgctatcttgcctctgaggccccctggatctaagccgttctccagcttcagatggggctggcacagactgcaggcccctccccgggcccccatcctgtccaggacggccgtcgggacggctgtggccgggccggtgtctgcccatctccctggctcctgtaggaattttccttgacacgagacagagtagagcaggagacggcaggcagggaggcaggagtcgaggggaggaggagaagaggcagacaggcaggcggggcatggggaagtcaagttcttggtgccctgtgctgggtcaaatgttgttcttggccacggctaaagccacacttggtggaatgccccaaaccctatgctttgggttgtacccatccccctcagcaagacatctggataacagccaccctctgccctggggagcagggaagctgctgggaaagctgccagccctgggtgggttcgaggcagatgtaggtcagaaggcgggcagggccccctgactctgcccacaggttcctggggccagtcttcagagctggggacagaggtgtgttcagaaaacgcttagacccattctccttgtaaagaatctaaagtgagagatggaaggatctgggtgggttagggggtgaccacaggtctcttgcgtcctctggcattcaggggagccccctcctccatgaaaggatatcaatgagggcaaggcccatggtcctgagggtcctccccgtgtggtgcgtgaacttagattcctttgcaactcagagctcaggtctgcttgtgcccattagagggcactggtcgggagagaaaaatcatctgtaccccagcacatgggtcttttcctcccttcttcagagcttgccagcatgctggtgtctcttcaccctacaaaagcagtgccctaaaaatgcacatccgatgggccacactgcccaagcccctcacattttaaggtgtgtgtgtgtgtgtgtgtgtgtgtgtgcatgcacgcgcgggtgttcctggtgatcctgtgcctaaatccaaaggaattaaactccggtggtgtattttaagatgctagcaggctggcaccagggatatcttagcacattgcatcaaggaagatggttacaggtttccctggtaccccataccatacctggcatgtagtgggcactcggtaatcctctgttgaatgatgaatgcaagggctcagctgctggatacagtcctcgaagccaaaggctgctgcagcggttccacctataaacaagtaagcaaattggtgggcaccgtaaccctgagcccagtgggcgggaacggtcgctgcaccatggcttgggaggaggaggagcctatgctctctggcatctttctggccacccctcggggtgaagtgtaatgtgctttgctgtcggacacacctaggtctaatctgagctccagcacctccccactgtggaacctggggcaagcggctccatcgctctgaggctgtttgcgcattctaaggatcaggtattctaaggattaggcattctaaggatcaagctttctaaggatcaagctcagtggtgtagggaaggcaccatggccagagtctggctctcagtggtggcttttcaggggtagcggggctttgtcagaaggaatctctgataaacattgggctactcctgggtccaggaacatgctggccattgcacatcacgcacaggatgggctgcaggacggggctccgtttccttctgtttcacggctgcaggccaccggccctactcaggcagcctccttcaacagcaagggccaaagacgaacaaagcccctcactgctaggaaacgggttctctctggctcgcctaattccagcctggatgaagtgccaccctgctgggctccctaccacctgtgctgttcctggtcctaacacatcccataccatagctgccagggactctactgcccaagggaaagggcatcttgttccgttcgtcccaagaatccagctccctgctgggtaggtagtagacactcaataaacacctgttgaacaaatgagcaaaagagcgtgagacttcagcactaggtcaacttgtattccccgtggttccgcttgagcctcaaacgatgcaatataacaagctctcttttctccccatcctactcttctatgcatctagtcgagtttcctggaataaacaaaatgctcccttagtccccagggtggggcttatttgtcatttttctagtggaaaataatgtgtacttactgtgaaaaaggacgtgactgttacaggggaaagaaacagagaggccaaaataagaaaatggtaagcatctgtattttcatcaccgcagataattgctgttggcagcctggtgggtggcctttgggtctttgtggttttgtgtgtgtgtgtgtgtgtgtgtgtgtatgtgtatgtgtgtgcctgtatgtgcgtgtgtttgggtctgcatgttttcattctgcattttcaaaactcattactgctttacaaactttctctctctttcttctttctttcttttctttctttctttctttctttctttttctttctttctttctttctttctttctttctttctttctttcttctttctttctttttctttctttcctctctttctctctctcttttccttccttcctttctttttcttttcttttctttttcttttttgagacagagtcttgctatgttgtccgggctggagggcagtggcgtgatctcagctcactgcaatctccatctcctgggttcaagcgattctcctgcctcagccttccgactagctgggattttaggcacacgccaccacacccagctaatttttgtactttttagtagagacggggttttaccatgttggtcaggatgatattgaactcctgacctcaagcgatccgcctgcctcggcctcccagagtgctgggattacaggcgtgagctactgtgcccggcccaaacatctttccatgtcagtaaatattcacctatttacagagacgcctaactggtgctgctggctgattctgctccccagtccctccatattatttcttttcttttctttttttttttttttgagatggagtcttgcactgtcgcccaggctggagtgcagtggcatgatcttggctcactgcaagctccacctgacaggttcatgccattctcctgcctcagcctcccaagtagctgggactacaggtgtctgccaccacgcccggctaattttttgtatttttagtagagacggggtttcaccatgttagccaggatggtctccatctcctgacctcgtgatctgcctgcctcggcctcccaaagtgatgggattacaggcgtgagccaccgtgcccagcccatattatttctttaaatgtctttagaaagaacgcgtttactggtttaccacaatccccatccctccctattgctgatttcaccactctcatcaaccaccttgtttttctagtttccatcatatggatggatgcactgtaaattttttgttttctttttttgagatggagtttcactctgtcacccaggctggagtgcagtggtgctatttcacctcactgcatcctcgcctcccaggttcaagcaattctcctgcctcagcctcccgagtagctgggattacaggcatgtgccatgcctggctaaattttgtatttttagtagagacaaagtttcaccatgtcggccaggctggtcttgaactcctgacctcaggtgatctgcctgcctcagcctcccaaagtgctgggattacaggcgtgagccactgcacccagccatgtatttcattagactgtcttcctggacatgtaggtggtttgtaaccttggtgaatggaggcagtggtttcatctctttgaagcaatagactttctgagtgcagataagaggagcgtttctagggaagatggctacatggccacaccaggagtcagcactctggtgacagtgatgtaccttggatctctgtgtccccagctggaattagagagagatttggacaggcttgtggctgaggcatgtcatctttggacgatggctctgtacttgggattgattgaaggtgaggagagcattggagccctgttgagagttagacaccggatgctggtgatgcctgagaaatgagatggggctcccatttcccaggggcttggagtcttggggacaggacgaggaaaccaaggactgtagaccggttcgtccggatgctgggggaggggcacctacagcacacccaggtctgggcaacttcccggaggaggtggcctcaggctgagctctggagaatacacggatggagaaggtggaggagaaacaggcatccagacagaggaaagagcgggtgccagaggacgagacctcaagtgtgatctgttagggactgagtagctccagggagctggactgaaagggactcacgcggggtggggaagggccagatggaaacgctcagggcttactccctcctttactggcataggaagcccttggagccaggggtggcattcagatttgcgtttttcagagctgcctctggaagcagcgtgggagacagatgggaggcagaaaaccagccagggctggggaagaagtgatggagaggagaggagacctgcagggggctggcgatggatgagatgtggcgggtgcaaggaaggtggcatccaagtggcttgcaggcttctggcccgggaccccgcgtgatggcatgcatagctttcaccaagctgcaagccacaggaggagaagctaatgtggtaaggacgggggagaaggatatgagttaattgggggcttaaaagccttagggcagagcagcctggtgcggtggctcacacctgtaatcccagcactttaggaggccgaggcgggtggatcgctttgaggttaggagttcgagaccagcctgacaaacatggcaaaaccccatctctactaaaaatacaaaaattagctgggcgtggtggtgggcacctgtaatcccagctactttggaggctgaggcaggagaattgcttgaacccaggaggcggaggttgcagcgagccaagattgtaccattgtactcctgcctgggtgacaagagcaaaactctgtctcaaaaaaaaaaaaaaaaaaaagtcttagcgcagagcaaagaggaggtgttcagcagatgattgcatatgtgggtctagaccagcgctgcccagcagaaccttcagctgtggtgcaaggtgctaagagctgtgctgtctagtatggcagctgctagtcacgtgagcacttaaaatgtggctccttggccgagaactggatgtttcattttgtttaactgacatagctccatgtggctcgtagccactgtactgacttaaacatttgcaagcccaggtctcagcagccaggtcagtggtggggacatggaatggggcattgtcagctgaagatgtggtgtggaccaggacaggcagaaagaggtcaggcacggtggcttcacgctgataatcctacccgctttgggaggccaaggctggaggattgcttgagaccagcctgggaaacatagtgagatcctgtctctaaaaaaaaaaaatttttttttttaattagctggatgtggtggcatgtgcttgtagttccagctacccgggaggctgagatgggaggatcacttgggtccaagggtttgaagctgcagtgagccatgactgtaccactgcactccagcctgggtgacaggagaccctgtctcctaaataaataaataaataaatgtagaattaggagcaagaggagctgagagctgaggaacagcctgggagagcacctgtctttgggggttgatcaggaaggctaaacactgggagacagtgtgggccaaaccccatggctgaagaagagggcagtcgacattggcagatgcttacagtgcgcacgaaagaggaatgcagaagggtgttgggtgccacgagggtcgtgggtgatcgtagccaagcagtcggggcggggccagcaggaggagggccagtgggatgctgtgctgattatattcctgacctagaagccccaggctggggataaagccctgtcttatgccaggcttcctcaggagctgcctggaaaatgctggggcttgtccaggccccagacaaccaaatacgtttgtgctgcttgtaaagggctgggtgcgacggggcaccaggccatagaattcccaggttctttcctccctctgttttgggagcggtcggtccccgagggcgtccccgctgctggtgctagggaagtgggcggcgggccaggccacctgcagagtgggctcaggacagctgttggtgcctcttctctctcacacggttctcaaagcaggggcaagcctgccgcccgaggccttccagctgggaggtgagctgaggacagctgctctactcaaggaaatctttgtttccactgggacggaatcggagctctggaggctgggctggccaagcgccccgaaggcccgatgcctgacggctcatgcggcctccttgtttgcagggcctgggcaaaaatttacactgagtcccactcttcgctccaggtgagtccttcctggtgaaggtgcagttgctccaagatgggagggagatgctttaggatgggagaattcttggcctatcttcgcttcacttttttgtcccaagccagacctcattcccctccagggaagaggaaaccgttgctaattaagtagcaagtaaccctggaagagtctgtattcatccctggacttgggctttggaagtaaccaaataaacacctaagccttaaaaacaaaccctccttctgcaagacagagggcagctttttggaaacaggagagagggagattgagagaggagataggctccaggaccccagcatctctcaggaaaaggggctgctcggctccatctggcgagaattccttccataagggacccccatccaccacgaggttgagggaaagagggagagtctgagaccagtgggggcagtgcagttagagcagggaatattagctattaaatgggcttctagaagaggtaaacacacatcactcatcaaatgggagccactctgcccgcctcctgcccatcaccggaggagtttggtcattgggcaattagtgtgatgaatgaatggcttctggcagggaggaaagggctatgagcagatgtcacctgtcagaaggacaccccaacgtggcaccttcctctttcttggcaccccagtacctgaatcctcttgcagcaacaggagagctctaagcttctcaacaggagaattctaccagacgtcagagccgagggggagtggactcagggcttctcttctggttgggaggattctggggatgttccaaaggtggctggaggggatggcacgaaggggtggtgatggctaaggggccgttgaggctgtgtagaaaccaggagtgtttgagttctgggctgaatcgtatttttttttttttttgagacagtctcactttgttgcacaggttggagtgcagtgatgcgatctcagctcactgcaacctctgcctcctgggttcaagcgattctcctgtcttagcctcctgagtagctgggattacagacacacaccactgcacccagctaatttttgtatttttagtagagacagggttttaccatgttggccaggctggcctcgagctcttggcctcaagtgatctgcccacctcagcctcccaaagtgctgggattataggcgtgagccaccatacctggcctgaatccaattcttgaactggacaccactagatgtgggataaagtcctatcttatgccaagtttccttgggagatgaatgtaaactgggggcgggggcaatgtctagaccctggaaaaggcagacgaagatgcttgtcttgggtggactgaggtctgggggacagcggagcccctggagggcatctgatacaggcacagggcaggagggagagttgacctttaggatctattcaagcaggctggggatggatgagatgcggatgcatgagaggaaagggtctaaacgcctctcagatttctggcctgctgtttgttcacagttactcttcctccttgatgacttcattttaatctagaacagagctgtccaacaaaactttctgcaatgattgaaatgttctattctatactttccaacatggtaaccactagctacatgtggctttttatttttatgttttgagagagggtcttgccctgttgcccaggctagggcgcagtggtgcagtcgtggctcactgcagcctcaaccccctgagatcaaccagtcctcttgcctcagcctccagagtagctgggactacaggtgcacactaccatgcctggctaatctttgcattttttgtagagatggggtctcgatatattgcccgggctggtcttgaactcctgggctcaggcgatcctcccaccttggcctcccaaggtgctgagattacagacatgaaccactgtgcccagcctacatgtattaatagttattgaatgcttgaaatgcggctagtgtagctgaagaactgaattttgaattttctttcattttaattaatttaaatttaaatagccacacataacagccactgtaccggacagcacagttctagaatgttacccacttagcattttaattcaacatgtgttgttctgtcttgagctataattgggtacgtgtctgtttccttcactagcctgttatattcttgaggtcagggaatagatttaattcctggttgaatcacttcctcccaagctcttgcacaatgccatgcaaatcatgggcattcagtaaacccagcctgtgttagatggtcagctgagagggcagcttggacatgtctgccaaggctccttccaattcaaggagattataggcttcttgcctctcagaacagctgctcacctgatgaggattaaagaaaaaggaaaacagtgtttacagaatgcttttgtcaaaaggccctgcgctgggtggagcataaggacaaaacccaggcacatagtcccagagcttcagaggtccgctgtcagcacacaagcatgagagcacggaggtgaaacaaaaatataacaggacccacttatttgtttatttattcaccatgcccagctatttttttgtttttgtttttgtttttttgagatggagtctcgctctgtcgccaggctggagtgcagtggcatgatctcggcttagcacaacctccgactccctggttcaagcgattctcctgcctcagcctcccaagtagctgggattacaggcacgtgccaccacgcccagctaatttttgtatttttagtagagccagggtttcaccatgttggctaggatggtctccaatctcccgacctcgtgatccacccgcctcggcctcccaaagtgctgggattacaggtgtgagccactgtgcccggccaattttggtatttttactagagacagggatttgccatgttggccaggctggtctcgaacccctgacttcaagtgatccaccctcctcggcctcctaaagtgctgggattacaggcgtgagccactgcgcccagccaaaaggcccaatttgaaacaaatataaggaatggtgaacttgcatgtgactactctctccttaaaggacctaccacagagctaagaggcctgtggagggataaaaattattattattattattaccacagggtctcactctgtcacccaggctagagtgcagtggtgcgatcatggcttactgcagccttgacttcctggactcaggtgatcctcctacctcagtctcttgagcagctgctgggactacaggcgaacaccaccatgcctggctaatttttgtgtttttggtagagatggggcttcaccatgttgtccaggatggtcttgaattcctaggctcaagcaatctacccaccttggcctcccaaagtgctgggatgacaggtgtgagccaccacaagcaaacaagggatacaatttttttctttttctttttttttttgagacggagtctcactctgttgctcaggctggagtgcagtggcgcgatcttggctcaccacaacctctgcctcctgagttcaagcaattctcctgcctcagcctcccgagtagctgggactacaggtgcaccccaccacgcccagctaatttttgtatttttagtagagatggggtttcaccatgttggccaggctggtcttgaactcctgacctcaggtgatccacctgccttggcctcccaaagtgttgggattacaggcgtgagccaccgcgcccggccgggatacaaattattcacaaggatgtgtcctcaggcttcctgtcctcctctacgtcctgcgtgtagcctggtttctcttttctggcctccctcctcctgtaaagggggatgtgttcttgttggggagaaggtcaggtgtaggtggatgatgtggggttgaggaagggacgctgaagagcggctagtcctcagggacatggagggaaggaaaatggtcgccgaattaccatggaaattggctcatatttgcaggatttgggaaaggcaagtaaagagcttgagtcatgctggaactgtcttcagttgccttgcctgcgatgaggcctggagactgggccacgtggatctggattcacacaggtttcacgtcactggccaagatgtgctcagggcacttccctggaactgcctaacacattcttccagataaccttgctgggacacagcctccctactgtagggggatttttgctggaaatcactaacagtgatctggagccaagtttggttagatgttgggcaatactgtctttgcccaaaagtgactaaaatgatcatcatgttatgacgctggctttgctgtgggatttggtaaaatgcttcttaagatcttttcaggaaggaaagatttcaacctgggtttgctctgactccgaacagcaggcttttgaggagagccaccaccgccaaagtggccttgtccctaccagcctgagcctggggctctctgctggggtttcccagccccaccccaccccagtgacagcatcgttcctaacccagctgcatcctggaccccgtctcttctgaccaaggtgtggaaaatccctttgctagactagaaagagatagaccaacataaaaacaaatgctggtgcttagctaggggcaattttgcccctgaggaacaggcatattaccatgtttggagacattttttgttgtcataactagaggtagtggtgctaatggcatctggtggggacagtccagggttactgctaagcatcctacagcacacaggctagccccccaccacaggggattatctaggcccaaacctcaatggtgccagggttggctggcgcggtggcaaacgcccgtaatcccagcactttgggaggccgaggcagatggatcacctgaggtcaggagtagttcaagaccagcctggccaacatggcgaaaccctgtctctactaaaaatacaaaaattagccgggtgtggaggcacacgcatataatctcagttactagggagactgaggcaggagaataacttgaacctgggaggcggaggttgcagtgagccaagatcgcgccacttcactccagcctgggtgacagagcgagactctgtctcaaaataaaataaaacaaaaaaacccagcaatccttcaatggtgccagggttgagaaaccacagagtagaataatccaaggtagctttttaatgcgttttgtagttactttccaacctctcttaaataaatatgtgtgtgtgtgtgtatatatatatatatgtaaatatgtatatatgtatatatatgtaaacatgtgtatgtgtatatataaaatttgggattcaggaaaaaaatatttaaagaaaggaaaatctcttttccttttaactggtacaagtttgccacttaaaaggaaaaaacagaataattattaaggcaccaaggagaaacagaggaaatacagaaatggagaaataaacaaatttagagaattcagtctgacaaatatttgctgagcaccagtgattcagggtgctgcaggatgcttggctaggggacgtcccagccctggaggaggtcacccacggtctgctgagtagactctcataggctagacaaactctctgcagtaggagacaataggaaaaataaaattatggcgcccacctataatcccagtactttgggaggccaaggcaggtgaattgcttgagctcaggagtttgagacgagccggggaaacacggtgaaaccgtgtctttacgaaaaaacaacaaaaaaatttagctgggcgtggtggcgcatgcctgtagtcccagctgcttgagaggttgaggtgggcagatggcctgagccgggagggttgaggctacagggaggcagagtgagaccctgtatcaaaaaagaaaactaagaccgaggatggagaatttttcccagttgaggggcctgggaaggcttcaggaagactatgagaccttgagttgggtgttgaagacaaggcgggcaggattttattgtcatctgttgtcagcctgtctgagtccaaatgcagcccccctgctcaaaaatcagtcttggcccggcgtggaggatcacgcctgtaatcccagcactttgggaggctgaggtgggcagatcacttgagcccgggagtttgagaccagcctgggcaacatggtgaaaatttgtctctacaaaaaaaaaaaaaaaaaaaaaaaattagctgggtgtggtagtgcatacctgcagtcccttctacttgtgaggctgaggtgggaggatggctcaagtccaggaggcagaggctgcagtgagccgagattgcaccactgcactcactcacagagtgagatcctgtcaaaaaaaaaaatcagaattttaggctaattagcttctccaagtctctgttttctcatttacatatctgctacagtcatgaatgtatattgtctccctagaggattgtggggccatccgtgatgggataaaaattattaatgaggaaatgttctcaaacctaactagacggatagctggagagagaacttagatgtgtattttataaattaccatgtgcacatacaccctttttttggcaagtggtgggaggtatcagagattctgggtgggggctgtggcctaagcagctccttggtcattgggacggtctctgggccctgacgcatgggagggacagctggctggtaggacacttggaggtgggggctccagctaagccactgcagagatggggcgtgggccatgcaaggtggtgaagactgggtgtaggtatgtgtgacaggggaggagagaggttcgggggggccagccttgctctcctcactgtcacctcggaggctctatcgggagagccctggactccagatcttcccctgcaatgttgacttggcgtgagggctctgcggggagcccttcagacttcactcaagagcccactaaagtcctgggccgtggctcacgcctggaatcccagcacctcgggaggccgaggtgggtggatcacttgaggtcagaagttccagaccagcctggccaacgtggtgaaaccccgtctctactaaaaatacaaaaattagctgggcgtggtggcgcatgcttgtaatcccagctgcttgggaggctgaggcaggagaatcacttgaacctaggaggcggagtgagccgagatcacactgctgcactccagcctgggtgacagagcaagactccatctcaaaaaaaaaaaaaaaaagcccgctacagacatcccccgcagaggctccaaagcccccgagcgacggtgtgtgtggaagaaattcccggcttcccaagatgagtaagacgtcgcggtcatcttggtgtgtaatatgggcagagaaagaaatctgtcaggattttaactttccttagacataagaggagttagaggagaaagagtctggcccagggcctttggagatgagcccttgctttcactgtttgcctctcaagaaagagctggagtccacgccggcctggcagccaggagtgagggacgcttctcacccaccttctcactgggcggctgtgtgttgaatgaggtgttcccacggggcctgcgacatttcgagttttacattttggtgaacaaagaggggttagagttgaccacagtcgctgtgcccctcggtggggaggttttcggcccacctgaaacggctgggcctgcgactcctgatgccagattcctgggcgaggggagcaagccgctcacagggtggcaggtgggcgttcgcctaatgtgggcccaagtgccgcccctcgcgggctccctggactccccacctccgtgagcacccctttctagaaggactgtcccaatactggatggagggggtcctgccccaagcttttgccaaaagctctgggagtgagacgtggggttggcttcctggaaggatgactgctctgtggggctgggcttggcacatccctaaagtagatgccaaggacacctgctgatgcgccgcctggtggccagaaagcagcttgcagccaccttcctacccacctacccaccggtgaaggacctggtcattgagccagctttgctttgagttaagggatgatgatcattcaaagcttgcttgggatttttcttactgtcctaagaggggtggtatacaattgtctgtggggccagcggctgatggactctccttcccgagaggctgggtgggcagagacagcaccttgctcagcaacccctcaacaccagcctgactggctgaggctctgggggcagagtgtgtgcgcacatgtgaaggtgtgtgtacatgtgagcgcatgtgtgcatgagtggatgtgcatgcatgtgaatgtgttgagagtatgcgggcgtgcacgtgagtgtgcatgtgatgtgggtatatgtgtgcatgttaatgtgtgcacgtgtgttgaaagtgtgcatgtgtggattgcatgtatgcgaatgtgcatgtgtgtggattgcatgtatatgaatgtgtgtgcatgtgtgggttgcatgtgtgtgtgggttgcatgtgtgtatgtgtgtgcatgtgtgcatggattgcatgtatgtgaatgtgtgtgcatgttggattgcatgtgagtgcatgtgatggtatatgtgtgtgagtgcatgtaaaagtgtgcatgtgtgtggattgcatgtgtgtgtgaatctgtgtgcatgtgatatgggtatatgtatgcatgtgtgtgcatgtgtgttgagagtgtgcatgtgatttgggtatgtgtgcatgtgagttgtgcatgtgtgttgagtgcatgtgagcatgtggattgcatgtgtgagtgcatgtgtgtggactgtgtatgtgcatgtatgtgcatgtgagtgtgagtgtatgtgtgttgactgtgtgcatgtgagcgtgtggattccatgtgtgttaagagtgtgcatatgggtgcgtggattgcatgagtgtgcatgtgatgtgggtatatgtatgcatgtgtgtaggtttcattgttgagactgtgcatgtgtattgtgtgtacatgtgtgtggattacatgtgtgtggattgcatgtgtgttgggtgcatgtgaatgtgtgggttgcatgtgagtgtatgtgactgtgtgtgcatgtgtggattgcatgtgtgttgagtgtgtgcatgtgtgggggttgcatgtatgtgaatgtgtgtgcatgtgcgtgtgtgcacgtgagtgcgtcgtgagtgcgtgtatgcatgcatgggtgtgtgagagtgattgtcctcccagaagctgtgtaactgcagcatttcccagtggcgtgaggctggggaagcacctccgatttccaggctgtttctctccccaattttcaggctgtttctctgtgcagctccttcctaactcggtgccttccctgtgtgtttctttcccaccagggcccggcaggaagatgggctcccgtggacagggactcttgctggcgtactgcctgctccttgcctttgcctctggcctggtcctgagtcgtgtgccccatgtccagggggaacagcaggagtgggaggggactgaggagctgccgtcgcctccggaccatgccgagaggtgaggggccacgagggtgtaatagcaggagctctggctctggccaggctgagcctgggccttggggcccctgggggagctagttcactgtgagatgtgaaggcaagaaagctgaagctgagccgtggccctgctggaggctggtcctgcaggacagacgagcgattcctcctttcagtggcttgggcacctcacctgaaactgcggacagtgatccagcctcaccacgagcctaaaggagtggggtctgcaagtggctttgcagctgcctccttaagagcagaccaagctcccaacctgccctccagtttgtctttccattctcactttgtccgctgagaatatctgctggggacctaggcaccacttggaggcagggagaagtggagcatggccttaggagagatgctggaccaagagctggtgtccatggcccacgcgtcttatcacactgcaggacaggagaggacagcggagactgggtgggccaagtgtcggcttcccttgaaaggttgtgaaggactctggatggccttcgtgtctacgacctgcaatgacagagagactccagccgacctgggacatttcctagggaagccgagtgcttcatccaactgccatgtacccagagtgaggtcctggagacccggcgacagctcaagcctggcttggagtctcttcattattttgagcgttgggctgacttgatacttgaggcttcagactaacttcagtgtacgatgggattggacaggatttgaggttgagtcacatcattccgttctttcttcctctccctcctctttctttgattgagcccctcctatcagtcaggccatcccccaggcacggggggacacatgagtggcacagtcctggcctccaggagctctgaggccgagagggagatagacacatgagagacagggcagcgtggtgggctttgtagtaggggtgtacccatgacgctggaggcagggccaggagagggaggagcgggtcccaggaagactgaaaggagtgaactaggtcttgaaggacacctgcgggcctcccaggtgcagaaggaggggaaagctacctggtagccagaatggggtgtgcaaaggcatggctggtggtgtttgttgggctggtgggtggtttgggatggtgagacccagtgctggaggctggaggctggaggacagtagggcagttgagcctggaggcagctgggtctagttggggagggtctcacctgaactcaatcctacaaagaacaagaggaatcatgggaaagcttgaattggacggtgttctcggaagaatgccagagggaggcagcagagaggatgagctggtgcggggaggggcagattccaagtgagagtcgaaatggcaggggtgcatcagagatgatgagggccctgggctcagttctggaggtgccttttggctgggagcccaggactctgctgaaagttgtgccagggggttggcggagggagtcgggggtgatgccgaaggctccaccctgggcacccgctgttgatgccaggaacagagctcagaaagagaagattccaggggcgaagggatggggacaggggtttcggttttgcatacatgacatctgtggggcctgttgcatctccagatggagacttctggtgagaagtttgaagtcaaggtctggggcttaggagagaggtaggggtgagatgtccatctgggagtcctgggcttatgggtagctgaacttagggcacagagatccgtttcctggatagtctggggtgcagaagtgggagcagcattagatgaggagctggcccatccagggggactttgctgcccccgtgggtctgcgcagctctacagcctgggcaagaagagccacaagccagagcacatgtgatgccatgaggggccgcgaggtggcagccaggagccgccgccgtccatcctgcctgcgggcttgtccttccaatcaggttggaaacataagagtctctccagcggctacagctgaggggaatcctaaagatccagttgaaccttcttatttgcagacgagtcagcttcatatgttattttctagcatcacggatatacgatagggagtcccggcattgtcttgtgtcacccaaagaccctctcttagaagtgtggatttctcccgagcagcccccatcttgcgtggcactcaattgatcgctgcgtgtgtttccaggactgtcattgcctttaacagagggcagggggctcgttcggtagtgaggatcccagagtgggccgtgagcccaccagcgtgaacacagagccttgtgggtccaggtgagagagtgagaaggcaggtcaggcatgccagaaccactggcagcaggagagagcagcgtttccaggcctgagagtggctgactttcactgtgattctttattccctcagggctgaagaacaacatgaaaaatacaggcccagtcaggaccaggggctccctgcttcccggtgcttgcgctgctgtgaccccggtacctccatgtacccggcgaccgccgtgccccagatcaacatcactatcttgaaaggtcagatggctgcaaagacaagcacggggtggccgggctgctctgtgctgatccggaggaagggatggagtcgttagggtggggctaggcgagagcagaatggctccctcgggacagggagcagaggcaggcaggctgtcatctagaggggaaggcacaggaaattctgattttgaggctctggcccctctccaagaggaggggttggaaaggggcccacaggaccaagagcaggagagggagcccagaggctactcggggtctcgtccctccagttgtatgtggacgccaggcttctaggccctttgctttggggcttggtcccccagcctgctttctgaaatgccacctgctcgctccggtcctgcacacggcagataaccctgcacagccccgtgaaatcgaactggaaacacttgcagcctagatccccagctggccccgacatctggagttcatttgctcagagcgagccgtcggtctggccgcagagcccattgcttttggacgaacccgtatgttccattttcttttttttcttttctttttttttttttttaccagggctttccagaaggaaaaaaaaattattgcttctgggcgaaaatagaaccatccttgaggttgagtctgtttgcttggccattttgggaatcacaatacctctgtgccaggctgggacgccgcccgtggcagggggctgggggcaggagtgaagcttctgccaggtcagggctgtgaggacgaatcaggacagcgccagggaccggagagtgagcagccaaggctcaggacactaccggattgctccattaacagcacgcgttttcccatcccttttaggggagaagggtgaccgcggagatcgaggcctccaagggaaatatggcaaaacaggctcagcaggggccaggggccacactggacccaaagggcagaagggctccatgggggcccctggggagcggtgcaagagccactacgccgccttttcggtgggccggaagaagcccatgcacagcaaccactactaccagacggtgatcttcgacacggagttcgtgaacctctacgaccacttcaacatgttcaccggcaagttctactgctacgtgcccggcctctacttcttcagcctcaacgtgcacacctggaaccagaaggagacctacctgcacatcatgaagaacgaggaggaggtggtgatcttgttcgcgcaggtgggcgaccgcagcatcatgcaaagccagagcctgatgctggagctgcgagagcaggaccaggtgtgggtacgcctctacaagggcgaacgtgagaacgccatcttcagcgaggagctggacacctacatcaccttcagtggctacctggtcaagcacgccaccgagccctagctggccggccacctcctttcctctcgccaccttccacccctgcgctgtgctgaccccaccgcctcttccccgatccctggactccgactccctggctttggcattcagtgagacgccctgcacacacagaaagccaaagcgatcggtgctcccagatcccgcagcctctggagagagctgacggcagatgaaatcaccagggcggggcacccgcgagaaccctctgggaccttccgcggccctctctgcacacatcctcaagtgaccccgcacggcgagacgcgggtggcggcagggcgtcccagggtgcggcaccgcggctccagtccttggaaataattaggcaaattctaaaggtctcaaaaggagcaaagtaaaccgtggaggacaaagaaaagggttgttatttttgtctttccagccagcctgctggctcccaagagagaggccttttcagttgagactctgcttaagagaagatccaaagttaaagctctggggtcaggggaggggccgggggcaggaaactacctctggcttaattcttttaagccacgtaggaactttcttgagggataggtggaccctgacatccctgtggccttgcccaagggctctgctggtctttctgagtcacagctgcgaggtgatgggggctggggccccaggcgtcagcctcccagagggacagctgagccccctgccttggctccaggttggtagaagcagccgaagggctcctgacagtggccagggacccctgggtcccccaggcctgcagatgtttctatgaggggcagagctcctggtacatccatgtgtggctctgctccacccctgtgccaccccagagccctggggggtggtctccatgcctgccaccctggcatcggctttctgtgccgcctcccacacaaatcagccccagaaggccccggggccttggcttctgttttttataaaacacctcaagcagcactgcagtctcccatctcctcgtgggctaagcatcaccgcttccacgtgtgttgtgttggttggcagcaaggctgatccagaccccttctgcccccactgccctcatccaggcctctgaccagtagcctgagaggggctttttctaggcttcagagcaggggagagctggaaggggctagaaagctcccgcttgtctgtttctcaggctcctgtgagcctcagtcctgagaccagagtcaagaggaagtacacgtcccaatcacccgtgtcaggattcactctcaggagctgggtggcaggagaggcaatagcccctgtggcaattgcaggaccagctggagcagggttgcggtgtctccacggtgctctcgccctgcccatggccaccccagactctgatctccaggaaccccatagcccctctccacctcaccccatgttgatgcccagggtcactcttgctacccgctgggcccccaaacccccgctgcctctcttccttccccccatcccccacctggttttgactaatcctgcttccctctctgggcctggctgccgggatctggggtccctaagtccctctctttaaagaacttctgcgggtcagactctgaagccgagttgctgtgggcgtgcccggaagcagagcgccacactcgctgcttaagctcccccagctctttccagaaaacattaaactcagaattgtgttttcagcatcctgcctcgtcagtttgctcattaaactgaatccttttcgtcttctcctctccacccaaggcccactcctgcctgggaggccctcagcttcatacctggggacattggtacccagcaggtgcatgctggaccctgagttgcctcgctcctccagggggtgcagcctcccatgggtggggcagcgacagcgtgtctcagctgcagctgaacgtgtgcctgagtcgggcgcctggggcctgggtgggtctggggacttgtgagaggtgggtgggaggcaggggcttgatctcctgagcaggaccgcactgtcccccgggagggagagaaactgtggaggtagcagcttggccatggctctgcagcctggacactattcctttcctagggctgccgtggaaactggggttggggcgtgggtggcataagcctctagcggagggtccttcctgccccttccagctattggtagccccaggcactccttggcttgcggctgcatctcctcaggttctgcttccgtcttcatgtggccttcccctccgtgtgtctcaaatcttcctctcccttcccttactataacacctgttgctggatttagagaatcaggtaaatatttagggcccactgtaaatccaggatggtcttctctctagatcctaacttaattacgtctgcaaagactatttccaaataaggtgacattcacagatagcagaggtgaggacttggacatatctttttttgggggatacagttcaacctctaccatggcttgcagcttgaatacacccatcagcagccccctctgttctccagtggtgcagagcagatgttccttcttctctccatcgcttgccaactgggttaacagccaggcactgcatccagctgccagcggggagcacagaagctaccttgctctctctggtgccagcaggctgcaaacagctgatctccttcctctgcccgctcctggggtgaggccatgtgttcatgcttggccttgtgctagagccagactggatcaaggggaccctgcaatcctgctctgtacgggagaaggagcaggctcctacctccgcggagttcaggccactcagcagaggatgtgcttcccaggcagtggggagcaagggctaagtgcccttcccagaggtgcctggagggaaccagccagcttcatacaggtgcccaatgacaaccctctctggagacggagtcacgtggaccatataatacctgtttctctgctggccaaattcccatgggaaaagaggcagggtctgctccagtccgctccatgctccttttaacatccctctatctttggggtttccccacccccaatattttcaggctggcatttatgctccacccattcttcctccaaatatttcccttgctcctgctttgtggcagatcgtgtgctaggcactggaggcataaggacagataagatatggtccttgccttcctgaggactttcccagggtttcgactgccgtctgacagaggtcagccttctcagaagagctgcacgcttggtaccaagtgatctgctccacctgatgcctccccaagcagttgatcttgacgggatcctctcccggtttcctgtcccaagctggtgagaaattggctagccatctcactaaagggtctagaaaactcagttgcaatacaaatatcagtgttttagcaaaaggacttagtaatggctgatgactcagcccaacgaaataactgcctatgttaggactttcaggagcttttgtagccagggatggggatgaggaggtcatggcccacactagtcctcaatgataattttctgtaaggtccactatgggaacgcagtggcgtgatggcaagctgattttattgggccataatgactagcataagatgagacattgttgcccagattattaaaaaaaaatagaatgtaacagaaaataataaataatgcaagatatcgatgtcccaacatgcaaaagaatggagttgggcccctacctcacaccatatacgaaaattaggccttggatcaaaggcctaaatattagagccaaaactacaaaattcttagaagaaagcccaggcatacatcttcatgaccttggattaggtgatgatttcttaggtatgatatcaaaggtacaagcaacaaaagaaaaaaatagatcaactgcacatcatcaaacttgtaaatttctgtgtttcaaaggacaccatcaagtaagtgaaaagacaactcacagaatgggagaaaatatttgccatcatatatctgataagggacttatatctagaatatataaagaactcttgcaactcaataataaaaagacaaataatctaattaaaaatgggcaaagcagcccacacttctccagaggagatatacaagtaaccaatacacacatgaacaggtgtaatcatcagagaaatgcaagtcaaaaccacagtgagacacaactctacaaccaccaatacacacatgaacaggtgtatcatcagggaaacgcaaatcaaaaccacagtgagacaactctacaaccaatgggaaggctgttgtcaagaagacagatgataacatgtgttgctgaggatatggagctgctggaactgctgtcaggaatacaaaatggtgagtcccctttagaagacagcctggcagttcctcaaaatgttaagcatagagctacagctgacccagccataacacttctaggtatatacccaaaagacatgaaaatatatgtctatgaaaagcttatagatagatgttcatagcagcattattagtaataacaaagaagcaggtacaacccaagtgcccactcagctgatgaacaggtaaacaaatgcagtgtgtctatacaaagcaggcagatcacaaggtcaggagttcgagaccagcctggccaacatggtgaagccctgtttctactaaaaaaatacaaaaattagccaggcgtagtggtgtgtgcctgtaatcccagctacttgggagtctgaggcaggagaattgcttgaacctgggaggcagaggttgcagtgagcggagatcgtgccactgcattccagagcctgggtgacagagcaagactcactccatctcaaaaaaaaaaaaaaaaaaaaaaaaaggaatgaagtgctattacctactacaacattggtaaacctcagaaacattatcaaaagggaaagaagccagacagaaaaggccatacgttgcatgattccatttatatgaaatgaccagaataagcaaatctaaactaaaaattactgaattctacactttaaatggatgattctatggtatgtaaataatatctcaataaacagcagttatcaaaacaagtaacacaaaaccaaaaaattaggctgccgcagccttctctattcaaggctggaaagtcctggagctccagagtcatgaccttcagagttggtcccattgttctgggcttggcttacgatggcacaggggccaagggccagtgagatgggatgggagtgtcagggttagtttttccaaggacattgttgaacaagcatttttgaatcaactggtgggtgagatcacagagtcagcaggaggctgatgcaggtgccaggggaagcattccacaaggaatgactaattgaggaccatgtcttcctctctaaagtccttccacagctggggcagggatgggaaactatggtgacctcaagtgctcccatatcctgcccttcctagggcagaatggagtaagcccatttctcattatgcagatggccaggcaaggacaaggaatttctacttcagacacttttatagataggattagaagtccatatgctctggaaaatttggaaacctccttgcctaaagacaggaaatgttccaaccgctcaattgacatagccactaagttagttctccaagcaacttgagatcctgcttactgagatattccacaagaatgtattaaatgcctaccacatgagggaaaaaactcttaccatttagagttatcacaatcagaatataaaataactatgcttgctacattcagggaggtaaaaaaaaaggattgatatttgtggcagaaaactttaatgatggtgatgatggtggtgataataaagaagcaaatggaagctctagaagtgaaaaacaaaacaaatgaatttaagagcctgggcaacatggcaaaatcccatctttacaaaaaaatacaaaagctagccgggcatcgtggcacatgcctgtagtcccagctacttgggtggctgaggcaggaggaccacttgaaactgggaggtggaagctgcagtgagccatgcttgcaccactgcattccagcctggggtacagagtgggaccctgtctcagaaaaaaaaaaaaagaaaaagaaaaaaaaaaataaactaagaatttggtggataaatataccatcatactgtacacagctgaaaagaaaaatcagtgaattagaagagaaatcagaagaaaatatttagaaagaagtatggaaagacaaaaggatgaaaacacagaacaaaagtacagaagtgacaataagaaggcccaatacacgtgcaactggagtcccaggaggcaacatgagagagaaaaggcaacagaaatattggaagataaaatagctgagaaaaatcacccaattgatcagtctctaaggtacagattcaagaaactcagtgaatcccaagcaagacaaataaaaccaaggtcacagccagcatggcatatcatggtacaactactaaaaaccaaagaccaagagaaagtcttaaaagcagaggggaaaatattttctttcacaggagcaataataagtatcacaactgacctctgctgtggtttggatttgtgtcctcacccaagcatgtcaaattgtaattcccaatgttggagatggggcctggtgggaggtgattgggtcatgggggtggttcccccttgagtccccctgttcttgtgatagagttcacatgagatctggttgtgtcaaaatgtcttccccgtctctctcttcctcctgctctggccatgcaagaccagcctgcttcccctttgccttctgccatgattgaaagtttcctgaggcctctccagaagccatcatgcttcctctacagcctgaagaactgtgagccaattaaacctcttttctttgtaaattgcccagtctcaggcagttctttatagcaacaagagaatgaacaaatacaagcaaaagagcagaagccacaagatagcggaatggaatgtttaaagggctagaaataactgtccatctcagttctatttccaattaaaatatttttaaaaagatattttcaaacaaacaaaaattgggagactctgtcactggaaaacctgcactgagagaaaatgaatgcagaggaaaggtgagagatgcagggaggaatccaggcctagaataatggtgaatttggtggcgattctcaacggatgtcgccagtaagaaaataataatcttggaaaccagtcggaaaattctcagaatgttaaacatagagtttccacatgactcagtacttccactaagtgtatacccaagagaaataaggacaagctcccacacaaaagcttgtactccaatgttcctagtagtattcataatagccaaaaaatggaagcaacccaaatgtccatcagtgggtaacggaataaataaaatgtggtgtgtccatatgatgggctattatttggctataaaaggaatgaattagtgatgcatgctacagcatggaatgaacctcaaaacattacactgtgtgcgagaaaccagacatgaagaccacatattgtgggattccatttatatgaaatctccaggggaggcacatccatggagacagaaagcagacgagaagtttccaaggctgcttgtgtgtggtggggggattagaatacgactgctagttggtttctttttggggagacaaactgtttgtttgtttgtttttttgagatggagtcttgcactgttgcccaggctggagggcagtggcatgatcttggctcactgcaacctctgcctcccaggttcaagtgattctcctgcctcagcctcccaagtagctgggattacaggtgcatgccaccacgcctggctaatttttttgtatttttagtagagacagggtttcactatgttggtcagcctggtctcaaactcctgaccttgtgatccaccagccccggcctcccaaagtgctgggattacaggcgtgagccaccatggccggctgagacaaactgttctaaaactagattgtggtgatagctgcacaactctgttaattgtcttgttgttgttgttgtttgtttgtttttggagacagagtctcgctctgtcacccaggctagagtgcagtggtacgatctcagctcactgcgacctccacctcctgggctcaagtgattctcctgcctcagcctcccgagtagctgggattacaggtgtgcgccaccatgcctggctaatttttgtatttttagtgagacagggtttcaccatgtttgtcaggctggtcttgaactcctgacctcaggtgatccacccacctcgacctcccgaagtgctgggattacaggtatgagccaccacgcctggccgaactgttaaagaagaccttatttagtgactcttgttaaggcatggtaaggcagaccttatcaggactgttgagacaggtacagggaccattgcaatggggtcttgtggtggaggaaagggattgggtgtaacccagaatacagcttgggcaagtggggatttatagccggggagcagggtgggggtcagtgggtggaaaattcctaggaggaaacatcggggtgagggggttctggctataaccattaggtttttattgtggcagcatctgtagggaatgctgggctgtgagtcagcactgcttcccagtgcatgtataagttatgtttacgctatactatagtctattaagtgtgcaacagcattaattcttatcaaaaatgtacataccttaatttaaaaaatactttattggcccaggcatagtggctcacgcctgtcatctcagcactttgggaggctgaggcaggtggatttcttgagcccaggagttcaagaccagcctgggcaacgtggtgaaaccccatctctacaaaaagttagctgggcatggtggcacatgccagtactcctagctacttgggaggctgaggtgggaggaccacttgagcccagggaggtcaaggctgcagtgagctgagattgcaccactgcactcaaccctggatgacagagtgagactgtgtctcaaaaaacaataataataataagaatactttattggctaggtacagtggctcacacctgtaatctcagcgctttaggaggtcaaggtaggaggattgcttgagcttaggaattcgagaccaacctgtgcagcaaagtaagggcacctatcacctatctctacaaaaaatagaaaaaatttagccaggcagagtggcacacggctgtggtcccagctactcgggaggctgaggtgggaggatcacctgagcccagggaggttgaggctgcagtgagccatgatagcatctctgcactccagcctgggtgacagagccagactctatctcaaataataataataaccataataataataataataacaacaacaacacaactttgggaggccgacgtcacctgaggtgaggaattcgagaacagcctggccaacatggtgaaaccctgtctctgctaaaaatacaaaaattagccaggcgtggtggtgggcacctgtaatcccagctactagggtggctgaggcaggagaattgcttgaacctgggaggtggaggttgcagtgagctgagattgcaccactgcacttcagcctgggtgacagagccagactctgtctcaaacaaaacaaaacaaacaaaaaacaaaaccaaaactcttcaaagaaaatgaacagggctagaatctaatactggatgcagcatggtttttttctgaaacataccatgtcacccttggccttaaaactcccctcctcatgtggttatttgtgttacacccgcttattcctcaccccactgaccccaaacccaacacatcccaccattgccgactgtgacaaaaacttagtggccaacaccagagtcatggcaataagttccccttttgtgtgtgttttctttaaacgagcaatccacaacccccacaagaaagaataagataatgcccatgggccttaacgagggcctgatctcacaggtccccacccaccccaccgccacgtacacatatacacctcccccgctgggtgagctccctgctgtctctggactgcccatcgccctctcaggcacgttgttctctccagggtctgtgagtaataaactgcttctcttccgtcatgtgttctgtaatgatgcctcctggtcagggctcttctagagagtcactgtcttggtagggacacaggtcacacaaaagccacaagggcttccagtggaaacaagtttcctgggagaggaacacctggtgacacataggcattaggccatctaccagaataaagaaggctcttatggccaggcgtggtggctcacacctctaatcccagcgctttgggaagccaagtgggacagatcacctgaggtcaggagttggagaccagtctggccaacacagtgaaaccccatttctactaaaaaatacaaaaattagctcagtgtggtggcgcatgcctttaatcccagctacttgggaagctgaggcaggagaaatgctccaacccgagaggtggaggttgcagtgagctgagatcatgccactgcactccaggctgggcgacagagagagactctgtctcaaaaaaagaagcctcctgtgaaaggcatactgcaaacgcccaccagcacttcccctggagccttgtcagggcgagtttacaggcaccctccagaagagacctgaaggccaaattagaggaaaatcacaccaccactgagcagtacacttaaaatgggcaatttagcaaatcttatgtgtgttttatcacagtaaaaaatctggaaaaaaaaaaacaggaagcggagaagtggacggtggttggggttgggcaatgagtacatttgtatttgtgtgtgtgtgtgtgtgtgtgtgtgtgtgtgtgtgtatgtgtgacagagtctccgtctgtcacccaggttggaatgcagtggcgcgaccctggctcaccgcaacctccacctcctgggttcaagcgatctgctgcctcggcctcctgagtagttgggattacaggcacgtgccaccatgcctgggtaatttttgtatttttagtagaaacagggtttcaccatgttggtcaggctggtctcaaactcctgacctcgtgatccaccagcctcggcctcccaaagtgctgggattataggcgtgacccactgtgcctggccacatttgtattttaaattctacataatgtgcattgtgtgaggtgcacatgctacctttttagtatgaaaaaccaagctagcagccgggcatggtggctaatgcctgtaatcccagcactctgggaggccaaggcaggtggattatttgagcccgtaagttcaagaccagcctgggtaacatggtgaaaacccatctctacaaaaaatgcaaaaagtagctgggcatggtgtcatgcgcttgtggtcccagctgctcaggaggctgaagggggaggtgtggcaaacttcattcttgtcttttttttttttttttgagacagtatcgagcccaggaagttgaggtcgcagtgagctacgatcctgccaactgcgctccagcctgggtgacagagccagaccttgtctcagaaaagcaaaataaaacaaacaaaaacaagtaaaaccaaactagcacaaaaagctatatgtctttattatagaaaaatattcaaatagaagctggttattttagtttaaagtaaagtatcgggccaggcgcggtggctcgtgcctgtaatcccagcactttgggaggctgaggggggccgaggaggggcggatcacctgaggtcaggagttcgagaccagcctggccaacatggtgaaaccccgtgtctactaaaaatacgaaaaaaaaaaaaaaaagcccggcgtggcagcacatgcctgtaatcccagctacttgggaggctgaggcaggagaaccctttgaacctgggaggcagaggttgcagtgagctgagatagcaccactggactccagcctgggtgacagagcaagactatctcaaaaaaataaaataaattatctctcagattaagaaaacatatatcatatatatattaatagtaaagctttagttgccatagctagagattcctctgatggatctgggcaagtcaactgaaaaccttctggaagagattccccattctagatgacattaagaacattcatgattcatgggaggccaacattcacaggagtttggaagagcttgatgccaaccctcatggatggcttggagggtccaaaattccagtggaggaaggaactatagaggtggtggaaatagcagagaactagaacaagaagcggagcttggagatgggactgagttgccacaatctcatgatcaaacttaaatggatgagagctgcttcttagggatgagcaaagaaagtggtttcttgagatggaatctactcctggtgaagatgccatgaacattgttaaaatgacaacacaggatttagaatattccataaatgtaattgatacaacagtggcagggtttgagaggactgattctaatttttttttttagatggagttttgctctgtcacccaggctggagtacaacggcatgatcttggctcactgcaacctctgcctcccgggttcaagcgatgctcatgcctcagcctcccaagtggctgggattacaggtacccgccacagtgcctggctaatttttgtatttttagtagaggcggggtttcatcatgttgcccaggctgggctccaacttctgaccttaactgatcactttaaatcccaaagagctgggattacaggccaagccaccatgcctggcctgattataattttgaaagaggttcttctgtgggtaaaatgctatcaaatattattgcatgctgcggagaaatctttcctggatggaagagtccctcggtgtggcaaatttcatcattgtctttttttttttttttttttttttgaggcagagtctcactctgttgcccaggttgtgcagtagcacaatcatggctcactgcagccttgacctccccaagctcaggtgatcctctcacctcagcctccctagtagctgggactacaggcgtgtttcagcatgcctaatttttttttttttttgtagagaggcggttttgccatgttgcccaggctggtcttgaactcctgggctcaagcaatcctcctgccctgacctcccaaagtgctgggattacaggcgtgagccatggtgcccagccctgttgtcatattttaagaaattgccacagccagctgggcatggtgtctcatgcctgtaatcccagtattttgggaggccaaggtgggtggatcacgaggtcaagagatcaagaccatccaagccaacatggtgaaaccccgtctctactaaaaaatacaaaaattagctgggcatggtggcgcatgcctgtagtcccagctgctcgggaggctgaggcaggagaatcgcttgaatccgggaggcaggggttgcagtgagccgagatcgtgccactgcactccagcctggcgacagagctagactccatctcaaaaaaaaaaaaaaaaaaaaaaaaaagaaattgccacagccaccctaatcttcagtaaccaccaccctggacagtcagcagtcaccaacattgaggcaagatcctccaccagcaaaatgatgacaactagacttgctgaaggcttagataatcactagtaatttttagctatatatatatatatatatatatatatatatatttttttttttttttttttttttttttttttttgagatggagttttgctcttgttgcccaggctggaatgcagtggcatgatctcagctcactgtaacttctgcctcctgggttcaagtggttctcctgccttagccttctattacaggcatctgccactatgcccggctaattttgtatttttttgtagagacagggtttcaccatgttggccaggctggtcttgaaatcctgacatcaggcaatccacccacctcggcctcccaaagtgctgggattacaggcataggccaccgagcccggccacaataatgtatttttaaattaacgtgtgtaccttgtttcttaagacataatggtattgcacacttaataaactacagtataatgtaaacattactttataattaattaattttttttttattttagagatggggggtctcactctgttgtgcaggctgcagatccatggtgccaacacagctcacttcaacctccaactcccagactcaagcagtactcctccagcctcctgagaagctgggaccgcaggcatgcaccaccacgcccggctaatttttgtattttttttgttgttgttgtagagacagggtctcactatgttgtccagactagtcttgaactcctgggctcacttggtcctcctgcctcagcttctcaaagtgctgggattacaggcatgagccaaggtgcccagcccataaacataacttttataggctccaggaaaccaaaaaattgtaactcacttgtattagtttgttttcacgctggtgataaagacatacccaacactgggcaatttacaaaagaaagacgtttaacgaacttacagttccacgtagctggggaggcctcacaaccatggcagaaggtgaaagctacatctcacgtagtggcagacaagagaggagaagagaccttatgcaaggaaactcccctttttacaaccatcagatcttgtgagacttattcactatcacgagagcagcacgggaaagacccgcccccatgattcagttacttcccattgggtccctcccacaacatgtgggaattcaagatgagatttgggtggggacacagccaaactatatcatcactttattgcaatattaactttactttggtggactcaactgaatctgcaatatctttgaggcaagcctgtaccaaattaattacattgttgcataacaaaccacctacctaatagcttaagaagaaaacatcagttcctcatccgtcatgatcgtgggggttggcaggtggatctgctggctttatttggcttgttcatgaggctttctgcagcaggtagttcagctggagccaggtggcctatgatggcctcacgcacgtgtctagggcctcagctgaaagggctgaggtgtctatgtctctctccccgcatcctctttcatcccaggcttcttcggagtgtagtgatctcagcacagtgctccaagagggtaggagaggaatatatgaggcctactgggaccgggcctcgggagtcacatggtggcccctccatccagtcacagggccagcccagggaagcggtgggtaacagacttcaccatgtcatgggaggagatgcagagaatctgcagccatctttaacacatcagagaggccacttacaaaatgtcatttacccagaggcaaatctttttttttttcaagatggagtcttgctctgtcacccaggctggaatgcagtggtgcagtctcggctcactgcaacctctgcctccccagttcaagtgattctcctgcctcagctaagtagctgggactattggcacctgccaccatgcccagctaatttttgtatttttagtagagatggggtttcaccatgttggccaggctggtctcaaactcctgacctcaagtgatccacccacctccgcctcccaaagtgctaggattatgggcaagagccactgtgcccagccccagaggcaaatctaacaatcaatgtgtaagacctttacacagataactgttaagaagtataaaattgaaatccacggacagcacgttggttcttattctctgaaaagatgccaagacaggattggaagtccatgagatttatttggggacgtgtttgtgaaggataaaggcaggaggaggctgcagtggggagcttagactacgtgggaaagagagggcaaggcaggagaattgggttggaagaatctcaaactgtagcacagttcccagaaaggtttggccaggctgatgggtagtccttgagcaaacatgatcctttgtcacaatgctgtgctcagtcatgggctaagagcagactgtgggcagcacagcctcagcctggctttgtgaaatccccaaagacagcagctcagccctccagtcacctgttcccctgtgcccagcaggagatctgagtggtgcatctgcttggtctccgtggaagaatatgccatactcgtgtgctgtcaaacccaatcatataatgatgtcaattttttcccaacccgggatttcaattatatctcaatccaaattccagtagaaatcaacagaataggctgggctcagtggcacactcttgtaatcccagcactttgggaggccgaggcaggcaggtgacttgaggtcaggagttccagaccagcctggccaatagagtgaaaccccatctctactaaaaatacaaaattcagctgggcatgatggcccacacctgtaatcccagctagttgggaggctgaggcacaagaatcgcttgaacctgggaggcaggggttgcggtgagtggagatcacgccactgcactccagcctgggcgacagagcgagactccatctcaaaaaagaagaaagaaactgaaagtacgattctaaaagttatgtggggccgggcgcagtggctcacacctgtaatcccagcactttgggaggccgaggtgggaggatcacctgaggtcaggagttcaagaccagcctggccaaatggcaaaaccccgtctttactaaaaatacaaaaattagctgggcatggtggtgtgtgcctgtaatcccagctactcaggaggctgagtaggagaatcgcttgaacctgggaggtggaggttgcagtgagccaagattgtgccactgcactccagcctgggagacacagttagactccatctcaataaaataaaataaaataaaataaaataaaaattatatggaaatataagggccaagaatatccctgttaatcttggagatcaaggtcagagaacttgttctgctaaatataaagatttattttaaagcttcgacattaagactttgggatgtgcacaataaagacaaatggaatagagggctcaggcacgtgtggatgtgtgactttccagaagggggcactgcagagccacaaaagagactttctggaaatcatgtgatgactggagggacatacgataaaaaataaaataaaacgtgtccccttccctcacgtcataaataaaagcaattgcaggtgagctgcagatttgaagattaacggaaaaacagtaacgcttgcggaaaataacagaggatggcgtagcccataaggtcatgactttgaagtaaggaagtgtctttagaaaaatccacgaaactactaataataagagaaaaggctgatgaactttactacagtaaaattaagaacttttttttgatgggttaaggaggagctaaaagtagaaattacagagtatttagaacttcatgaaaatgcaagtactaccccatcaaaacctatggagtaacaagagaagtgattctcaggggcacacgtgtccctgagactgcatgcatttgaaaacaaaaaagatttaaaaataagcgaaccccaattcgcaattgcaaaatcatggaaccaacccaaatgcccatcaatcaaagagtggataaagaaactgtgtgtgtgagagagagagagatatatatatatcacagtatatatatcatatatggtatatatatggtatatcatatatatactgtgatatataagatataattattatatatactgtgatatataagatatgattatatgatatataaatgatatatatgatataccaaatatacaccatatatatgatatatactgtgatatatatgatatactgatatatcacatatatatgatatacatcagtatatatactaatacatgtgatatatacatatatatgatgtgaaagagagaaactgtgagagagatatacatcatatacatacagtgatatatatgacatactgatatatatcacatatgatacacatatatcatatatctgatatgtaagtgatatatatatacacacacacacacatataggatggaataccactcagccataaaaaggaatgagttaacagcatttgcagtgacctggatgagattggagagtattactctaagtgaagttactagggaatgggaaaccaaacaccttatgttctcactcataagtgggagctaagctatgagaatgcaaaggcataagaatgatacaatggactttggggatttggggggaagggtgggaaggggtgatggataaaagaccacaaatagggtacagtgtgtactgcttgggtgatgtgtgcaccaacatctcagaaatcaccactaaagaacttactcatgtaaccaaataccacctgtaccccaataacctatggaaaaataaaaaatcaaaaaatgagaatagaaataaaaaaataagtgaacctaagtttccacttttgaaaccagaaaaatggccaggcagccaggcgcagtgactcacgcctgtaatcccagcactttgggaggccgagacgggtggatcacctgaggtcaggagtttgggaccaacctggttaacatagtgaaatcccatctctactaaaaataaaaaattagccgggtgtggtggcatgtacctgtagtcccagctactcgggaggctgaggcaggagaatcgcttgaacccaggaggcagaggttgcagtgaaccgagattgcaccactgcactccagcctgggtgacagagtgagactcagtctcaaaaaaaaaaaaaaaatggacagatgaggtggctcatgcctgcaatccccgcattttgggagaccgaggcaggagcatcacttgagcccaggagtacgagaccagctgggcaacatggtaaaaccctgtctctacaaaaaaattagtcaggtgtggtggtatgcacctgtagtcctagctaccggcaaggccgaggtgggaggatcgcttaagcccaggggttgcagaggttacagtgagctgagatcttgccaactgcactccagccttggtgacagagcaagaccctggcaaacacacacacacacacacacacacacacacacaaaacaaacaccaaaaaaaccaaacaagaaaaatccagaaaaagaacagcataaatccaaagagcatgaaaatattaaaagcagaaattagtgaaacaaaaaatagaacaaaataaagagcttgttttttgaacagacgagtaacatggacagtccttcagcaaaaaagcatgaagaaaaaaaggaagaagacacaaataaacacaaagaggcggcacaaccaagagacgaaaagagacgattaggagcaacttaataccccaaatttgaaaaccttgatgaaatggacacttttctaggaaaacagtaatcagcaaaattggcccagaaagaaaggaaggtctgagtaggtcaataaccaagaaggaagatgaactattaaagacctacttcccaaaaggcatctgaatttgtagatgtaaaaagaaaaaacaaacaaacacaattaagctagagaattattagccaaagatgcaggagaatacctttgtgagcttacagcaggacagctctgctaaactggggaaacaggaaagtcatatatgatgatatgaatccacctgaccatactgaagtgtgaaataccaatagtaccagagactttgaaagagttcaagacaagcagcacacagattcgctcccttcatatacagtaaaggcaaaatatcagtatctggggtatgcaatacacccctaaacaccagtaagaaaataacataattgaaatgaacaaagggcttaatgggattgtcacagaagatgtaacacatgtcccaagggctaattgacattacaagctgtgcaacttgaagtttttgtgtgtgtgtgtcgaattgcttttttctttttctttttttttttttctttttttgagacagggtctcactctgtcgcccaggctggagtgcagtggtgcagtctcggctcactgcagccttaacctccagggctcaagcaatcctcccacttcagcttcccgagtagctgggactacaggcgaatgccaccatgcctggctaattttttgtatttttttgtagagacggggttttgccatgttgcccaggctggtcttgaactcctgggctcaagtgattcatacacctcggcctcctaaagtgctgagattgcaggagtgagcctcccatgcctggctggttcagatcttttgagagacagggccttgctttgtcaccccggctggagtgcagtgatgcagttatagctcactgcagcctcactgctggttcacactatcctcttgcctcggcctccagagtagctgggaatacaggtgtgtgccacaatgcctgtctgatttaaaaataaattttttttttgagatggagtctcacactgtcacccaggctggagtgcagtggcccgatcttggctcactgcaacctctgccttccaggttcaggcgattctcccgcctcagcctcccaagtagccgggattgcaggcacctaccaccacacctggctaattttttgtatttttagtagagatggggtttcactatgttggccaggctggtctcgaacgcctgaccatgatccacccgcctccgcctcccaaagtgctgggattacaggcgtgagccactgccccggcctaaaatttttttgtagacttgcaggtgtctcattatgctgcccaggctggtttcaaactcctggactcaagccatcctttcaccttggcttcccaaagtgctgggattgcaggcatgaaccaccatgcctggtgcaacttaaagttaaaacaacaatgaaactcaatgttcacacatcaggtgagcaaaaaaaaaatcttaaagtttgataacatcactgtttgtgaggttgcagagtaatacacactcatccagtgctggggaagatgtcagtggtgaaaccattttgaatgacaatttggtagtgactgttacaactgaaagtgtgcatatgctactgttagtaactcatgtttttaccttaaaaagaaaaaacatatatatatacaacccaaaaaggtttatacaaagatattcattttaacataaaaaatagcaaacaaatgtttgttatgttgctatttaagcattcactgaaatgatggcatattaagtagcagtcaaaatgaacaaattagagttacataaatcaatatggcttgatttaaaaaatactgctaggtgtaaaaagcaagatgcagaataacctgtacaatatgatacgatttttataaaacacaaacagccctatacagttccaggtacatacacatattttaaagcatgtatgttttgaatatctatacatgtacagaaaagtattttattttagtttagtttagtttagtttaatttatttttgagacagagtcttgctctgtcacccaggctggagtgcagtggcgtgatcttggctcactgcaatctccgcctcctgggttcaagtgattctcctgcctcagcctccagagtagctgggcttacaggtgtgcactaccatgcctggctaattttttgtatttttagcagagacagggttttgccatgttgctcaggtctcaaagtcctgagctcaagtgatctgcccacctcagcctcccaaagtgctgggattacaggtgtaagccactgtgcgtggcccagaaaagtattttaaaacatctgaaaaatacaggccaaattgctgatattggtggaatactgaagggtggactattgagggggaagtatggaaagcaagggggagtggatgaaaggcagcatgaattctatctgcaatgctttgaaattttaaaaggagaaaatgaatgccgtgtgtcaaaagacaaaattataacacatttagttataaatctaattggcttttatttgagattcatgaatcggggcagcttcccttctacaacatggagtaagagcttccattggccaacggcagacagcggcttttgtgagatgggaacaaggaaacggaaccacgggaaaaacgtcaattggtcaccatcgtgttacctcctttggtaaaggttaaagcagaggggacttccttatcacactgacttaagtagactggaatctcctgttttcaggaaaaacttgtctgtttgggatctatctgcttccttaagggttcggtttgatgatatgtggcgtttagcatgagtgactccatcttgctttgctgtggtctgttggagcctagtgtaggagctcagtccaaaataatgggttcccataatttttgtttaacaaacacttgtgcaattgcaataataacacaagggaaaatgggcagggcaggcatcccaggtagtgtcaatgtattgttgaggagtgagtgtgtgttcacagacagaggcgtgcaggcaggcaggactttcgagcaggtacctgggtgcagcctccagtgggtataaaggtgagtcggggggctggagccagaggccagccatagccacagctttctttcattcattaagcctttactgagtaccaaggagaaagggagtgacagttgaaaagttattcttactctttcttccttttttttttttttttttttttgagacagggtctcaatctgttgcccgggatggaggtgcagtggcacaatcatggttcactgcagcctcgactcccggggctcaagtgatcctcctacctcagcctcctgagtagctgggagtacaggcgcatgccaccacctggctaattttttgtttgtttgtttgagatggactcttgctgtgttgtcaggctggagtgcagtggcatgatcgtggctcactgcaacctctgcctctcaggttcaagcgattcccctgcctcagtctcccaagtagctgggactacaggtgcatgccaccatgcccggctaattttttgtatttcagtagagactgggtttcaccatgtttggccagaatggtctcgatctcctgacctcaagtgatctgcccacctctacctcccaaagtgctaggattacaggcatgagccaccgtgcctggcccaggctaatttttcatatttttttggagagatggggtttctccatgttgcccaggctggtttccaagcctgctcaagcaatcagtcctcctgccttggcctcccaaagtgatgagattacaggcgtgagccactgcgtccagccttgaaagttttacattgtgctttttgtttttcctccagctggtctgagacatgtatctgaatgaagggacagtgagatttattgcagaaggaatgcagtgacaacgaacaaggtaagaagattttgaatgacaaaaaaagataccagccttgcaagcaggctgctgttttgagaggtttgtctaaattccaggatttatcccactcatcttagttagatttagctactgtaaaaacaccaacagagtattggcttaaataagacagaagggtatttctgtcatttaagagtctgggctggccgggagcagtggctcatgcctgcaattccagcattttgggaggctgaggtgggcagatcagcctgatgacagagcaagactccatctcaaagaaaaaaaaaaaaaattagcctggcgtggtggtgggcgcctgtactcccagctattcaggagactgaggtgggagttcgagactagcctggccaacatggtgaaaccctgtctccaccgaaaatacaaaaaattaccaggcgtgatggtgggcgcctgtaatcccagctacttgggaggctgaggcaggagaatcgcttgaacccgggagctggaggttgcagttagtgtgcggagatcacgccactgagctccagcctggatgagagtgagactctgtctcaaaaaaaaaaaaagtccagacataagcagtccagggcaacactagtcttgctgttggggacctaggcccctcccagcccttccacaagtggctttcatctcatggtctcagatggttgctgcagttcctgccatcacatccttgcacccagctggcgaccaagagaagccaggaaggaaaggtggagggcaatgccccctttgttttgcaggcacaaccagaattgcacttctcactttgtttcttgtttcataaaccacagcttacttgtaagtaagtacacgtggaaggtctaagttctgcctctggggaatgctgtcttcatctgggctaccatgtagtcagcaaaaacgtggggcttccgttcctaaaggacaggctcggaaggaatattggggacaattagttcctgccacactcttcagcatatcagcaaccaagcccggggaccaggtggtgtccactcacctgattctcatttccggctcccccggaggccatgaaggaggaggcagaggaaggcagagcaagcaggtgtgactctaggtccccactccgggcgctctgggcatggcgagggggggtgcagaggcaagtgcatgcactgcgtcacgacctgcaacaggaagctgatgggacagcatggtcaggcagggagacccgaggctcagctgtcccaaaccaaccagtactggtgtgggcagagcccaggacagccaagagcctgcagggaggtgtcagaggggcccctgtaacagggcagggtggctctgccgaggctgtagttcagattcacaggtagggatgccagatttagcaaatgcatagacagcatcctagttcagtttgaattttagataaatatgcaataactttttaatataagcttgtcctatgtcccaggcatcatttatttggaattcaaatttaactgattgctctgtatgttatctgaaaacaccagaaggttagggttttagagggcccactcaggcctcaaacggatccagagccccagtatgagccaatgtgagctcaaggcagacagggcccctccaggcttggcctgacatccagagagaccacgagccacaggggctaacaagaggccacaaggcctaagtcctttctgtcctcaggggcgtgcaaggctgccttcactttcttgctcttctagaccaggtgcctactctttggaaaggagagaagaaaagggaggtttgggcatattttctcccagagactgagcattacccaaaggctgttcaaagtatcccttagaactgtgttctaacctgggtaggatgaaagtttatctatttttattgctaagctgcaggtgagggcttgggaacacctggttacatgcaccccagatcaagactgtccacgtccggtgcacccctgaacacagcaggagggaacttggggatccactgccctcgctcactgtaagcttcccaggactgaagccccaaagaggagccctctgccttctctgtcctccccatgggtcagcgtgtcctgcttctgagtggcccgtccttcctgcctaactggctggcctgcaccatggcccatattcaacaaccttagtcatagttcccaccattggcgtttatggaagcttggagcctcataaagttcaaagtctgcaacaataataaaggcccagtcaacttggcttgggcggcagctgcagcccagcactggaagctcctagctgtggaggggcgttggggcctggagggaggagagccttggtttgccctgtggggcccagccttgagttctggcttctcagggctctgttctatcatgtttcctgtgaactccttttgtgcctaagacgctgggcagtgccactcttgcagaggtgccactccaggccctgcacgcttaggggtagagcaactactactgttgggcacaggcgtggggctgtagaaagaaatccgtgtttcactggaaaactatgcatcctacataggacaccagcttccacatggcccgatactaacctactaacctttcatctttttttttttttttttgagacggagtctccctctgtcgcccaggctggagtgcaatggcaccgtctcggctcattgcagcctctgcctcccgggttccagcgattctccagtctcagcctctcaggtagctgggattacaggcatgcaccaccacgcccggctaatttttgtattttaagtagagacggggtttcaccatgttggccagggtagtctcgaactcctgacttcaggtgatccgcccgcctcggcctcccaaagtgctggaatcgcagacgtgagtcaccgcgcccggtctgaaaattatcttttaataggggttagctgcatgagttaaaatctcattgccaccatttgctgactttgtgccctctgggagattgcttaatctctctgggataaacctcggtttgcttgacaaaggaagctggtgaggctaaagagagaactctaagattggggcgttccgaagccttctagagccttctagcaccctggactcatagccaatgatgggcaacaacaagaacgacgacgaaccctgggctcggaactcgcccaggccccgcccctcacagccccgccccgtcctcggccccgcccccggcctgtcgcctcaacaaagtccccgccgcgcggccgctggccgggagtcagctcggagtcccgtcccagcgcggcgtcagcgctgcgcacttcccattggccgagcgcggcgcgggggcgggcccgggcctgcgattgcctctcggcgtgcgcggacagtgtcatggaggccgcggcggtgacggtcacccggtcggctacacggcggcggcggcggcagctgcaggggctggcggccccggaggcggggacgcaggaggagcaggaggatcaggagccgcggccgcggcggcggcggccgggaaggaggtggggctgcggggcccgcgtgaaccccgatccgcggggctgagagtccgtggccccggggcccgaggtttcccggcacgggcgcgccgaggggcggggggccggcgcctgtgtccgctccgtgcacagtaagggacagagggtggcagcgcccctccgccccggtccgccccgccgtcctcgcgccactgccgggcagcggcctccggcccccgtgcgtgacccctgcctatctcagaaatacgggtgcaaacccgagtggccgcggggcccagcgggaatcccgacgccccggccagacccctgcttcccacgtcgctggtctatgcggaagatcccggcggcggtgctcatgcctggctcagtggatgccggctggtggaaggggtggccttctgtaggggtgacactagaactgagtctttggggaggaggaagccttcagtaggtggagaatagggagtagggtatccaactggcggggaacagaaagggccaaagcacagagacagaaagggacgaacatgcccctctgggctgggcttccttcctttggggggcacttgcccacccggtaaactccccctcagtaggttgcagggggagaagttaggagcacagacatggcttccggaaacagcagccgtagctttgtttctaaacccaaagcagtgagactgctgagcatttcagacctcatgaagatgggatgaaggctggctgctgggaaagatatttttggacaggaggaatgtggagatggctctttccctcctagtggaggaatgacaggtgacaaaggtgacctggtgtgggattgttctgagaaggtctgggagggggtggctgaagtataataaggacatcaacgaggaagggggctttggaaaaggaaggtggagaggaacaactgcggcatctctgcttgaatccgtccccgacccctgcagttctcagggtctcccaatgtcattctggaggccctgggtcagtgtttggtgatggcagatgctacagaggactctttgcaacaggcctctgaatggcagtggagtgatggcagatgacaactcagtgaacaaagaagtggccttgggcgttggtagatttagggaatctcaacgttggtgccatggcctctaaatagccactgcggtgtcttcttactgctcctaaaataataatgattttttaggccaggcatggtggcttatgcctgtaatctcagcacttgggaggctgaggcgtgtgatcacctgagttcgggagtttgagaccagcctggccaacatggtgaaactcagtctctactaaaagtacaaaattagtcaggcgtggtggcagatgcctgtaatcccagctacttgggaggctgaggcaggagactcacttgaacccaggaactggaggttgcagtgagctgagatttcaccaccttactccagcctgggcgacagagcgagactctgtctcaattaatcaatcaatttttaaaagaaagtggtttgagatgtatttaggagctttccatgttaatgtaccgaaggaacgaaggaactctttctccctgtaacatacatccatgaacagcgcggaaggcacttagggaagtgtggcctatagaggaagcctggtctctgctctcttaggacctgaaactttctggtgctttgggtatttggatattgccccttggccatagaaaatcctggggaccctgtgaagtatttatgtctggtctttgtggtattggggtggctgctttagagggtaaggtttattctatttatttatttttttgagatggagtctcgttctgttgcccaagttggagtgtagtggcacagtcccggctcactgcaaccttcgcctcccaggttcaagtgattctccctgcctcagcctcccaaggtgctgggattacaggcgtgtgccaccatgcccagctaatttttgtattagtagagatggggttttgccatgttggccaggctggtctttaactcctgacctcaggtgattcgcctgccttggcttcccaaagtgttgggattacaggcgtgaaccactgcgtctggcctagggtaaggtttattcttaggagtaatcattggtacgtgtgtccatgtggaagccaagccctggttgctaatataggtaaaaccttaggattatcacagggcacttccttgctttatacaatgtttctatagttaatattaaacaacataaggcagagaatatctctctgtgtttagatgaaactggtccatttgcttctaagtgttcttacctatttatgtttttatttataaatgtacaactccctctttgcttagcatcaaagatgaagaagaagagacagtctttcgagaggtggtcagtttttccccggaccccctgccaggtgaggagacagaggctctgaataccgatccaccttcacacctggggctttggggcaggtcagcccctgccccctctcatgttccttctctgttattgttaaaatgtttcgattaatcctataatagtttccattaattgctcaatgtttctgtcctcggaccagttagatattatgacaaggacaccaccaaaccaatcagcttttacttgtcttcgctggaggagctcttggcgtggaagccccgcttggaggatggctttaatgtggccctggagcccctggcgtgtcgccagccccctctgagcagccagaggccccggactttgttgtgtcatgacatgatgggcgggtacctggatgacaggtgaggacctggccttacattgatgttgcttacattgttctcctttgctggggtgggggctggaggggcgggagagagtgccatgtgtagaaagagcactgggcggggagtcaggagacgggcattggagggatggcactaactgcgagaagaaggcaggccccagtgtttcatctgtaaaaagggaagactgggctgggcttggtggctcacacctataatcccagcactttgggaggtcaaggcaggtgggtcacctgacctcaggagtttgagaccagcctggccaacatggcgaaactctgcccctactaaaaatagaaaaattagccaggcatggtggcaggtgcctgtaatcccagctacttagggggctaatgcaggagaatcgcttgaaccagggaggcagagattgcagtgagccaagattgcactactgcactccagcctgggcaacagagtgagactctgtctcaaaaaaataaaaaataaaaaaaggaaggttggattaggcagtgtcttatgtccctttcagctctagaatcatttgactccttgaacctcctcaacttgaaggctggtagtagattggagggagcacagcaggcagggggtcctcttcggctgcctgtccgcagcctcaccccctcacgtggtttggtgttcgtcaccttcttcccttaagctctgatcctgttctgggtcgctgggctctggctttcatgcacagagatgttacatgccccacccaccccaggtgcagacgtcccatccaaagttgccgtggagtccgcgcggcgcttttaaatgtccataaaacaatcttggaccctgtgattgatgggaaggcttgagtcagagccaaccatcaaggtagagatagaagcaggtggtgaaaccttgggcgcagctcacagggctttcaaccccgaccttcgagttccgggagactctgttctgagggactgcctacccctccaaatagagtgggaagccagagacgggactttgacacgagacttcctgcttcccctcctttctctcccttgttcattggctcacagggggtagcagtgctcggtccattagatgcaatggcagatgcctgatgccccggtcagagcactctgcctgtggctacaggagtggcagctggttcctgcctctctccctgcctgcaccttgcctggacacagcaggcttccagggagtcttgactgaatggaactaaagagaaacctttggggacaccctgcggtctccgtgtccttattctgcttcctgggacctgactctgtttctttttttctgtattttgagacagggtcttactctgtcacccaggctggagtacagtggtacaatctgggctctctccagccttgacctcccaggctcaagcaactctcccacttcagcctcccaagtagctgggactacaggtgtgcaccaccacacctggctaatttttccagtttttgtggggagagatggggttttgccatgttgcccaggctggtcttaaactcctgggctcaagtgatccacctgccttggcctgccaaagtgctgggaataaaggcatgagctgccgtggccagccctgttctgtttctttccccaggttcattcagggctcggtggtgcagactccctatgctttctaccactggcagtgcatcgacgtctttgtgtacttcagccaccacaccgtcaccattcccccagtgggctggaccaacactgcccacaggcatggggtctgcgtgctgggtaagagccaaggactcacctctgtgtcagccagactcctcagctcaccagccaggggaccccgtgattaggaggcacgggctttgcctgcttctcagtgcccagagcccctcgctgggggccgccttggtcggctaggacaggcagctgcaggctttttctggaaaggaccagatagtattttcatgatttcagaccactgggtcactgtggtgattattggagtgatggcaggtacacaaataggcagggccgtgttccagtaaaattgcattttacaaacacaggtagtagtgggcatcggcccaagggccacggtttgccgattcctgggtcagaacaatgcttctcagctttagcctcaatcccgatcgttgatgggcttccgtcaccaggactgctggtctgcactggcagagtgtctgattcacgggatatatggggatttgaatgtctaccaagtggtcaggtgatactgaagctgctggttcgagaacctcgctttgaaaactgtgggtggagggaaagtgattcccgtggctgaccttgtttctctcctatcctcacagggactttcatcacggagtggaatgaagggggaaggctctgtgaagccttcctggccggggatgagcgctcgtaccaggcagtggctgaccggctggtccagatcactcagttttttcgttttgatggctggctgatcaacatcgagaactcgctgagtgtgagtgcccagccctcacccacctccccgccccttgctgtgttgccgcccacctccacctctttcctgccttggcctcacctcgccccacgcctgggctgcaggttgcagcagtaagagccacttctcgcctcccaggcagtgccaactctgaaatcttagttacacgcagtgagacagaatctcctccgactgtttccagcaagcgtgcttggccggctcccacgtttcccgcccctgcctgtgagcacacctttccttttccgcgctctgctctgggctgggtgtgtggcttccttctcagggcatcctcccctttcggtgcactctgtcttttcctgacttctgtgttcatgtccttcttgccgcaataagaaaggacggtcgtctgtttggctggactccacttgcggggctgtggcggggagggcctttcagaactgcagcttcgcctgtgggtctgtttgctctgcatccccctgtctgtccagcgctggatacttctcatgatagatagatctggggctcactgaggctctcaccttgttcttctctttcagctggccgctgtggggaacatgcctcctttcctgcggtacctcaccacacagctgcaccggcaggtcccagggggcctggtgctctggtatgacagcgtggtgcaaagtgggcagctcaaatggcaagacgaactcaaccagcacaacaggtgagcctgcagacaggtgctgtgagggggcaggtgccgtggtgggggcgggtactgtgaggggtgggtgccgcaaggggcgggcgcagtctccctcatggaggtgatgcatatatgactgcattgggtaaaaagagggagaaggtgggccaggcgcagtggctcatgtctgtaatcccagcactttgggacgccgaggtgggcagatcaagaggtcaggaagttgagaccatcctggctaacacggtgaaactccgtctctactgaaaatacaaaaaattagctgggcatggtggtgggcacctgtagccccagctactcgggaggctgaggcaggagaatggcgtgaacctgggaggcggagcttgcagtgagccaagatcgtgccactgcactccagcctgagcgacagagcgagactctgtctcaaaaaggcagagttctcttaacatcctgagcctcagcagacaccatggatgctgggcgagggtttcaggtcaccatctgggctgctcgctgcccctggggaacaggccatatcctaggtcctggaggcagctcccagcctgtgagttgcaggtgcctctgagatctaggaggggaaaggctgagattgtgcaggtggagggggtggccctgtccctctgggctctaggaggggaaaggctgaggctgtgtggggtggggtggggtggggtggggtggggtggggtgggcccatccctctgagtactaggaggggaaaggctgagactgcagggttggtgggggtggccccatccttctgggcctgggcctcacagcaggtccttgttgcttctcagggtcttctttgattcctgcgacggcttcttcactaactataactggcgggaggagcacttggagcggatgctggggcaggctggggagcgccgggctgatgtgtacgtgggcgtggatgtgtttgctcgagggaacgtggtcggaggccgattcgacacagacaaggtgggtggtggctttcgtccaagggccagcggcccagtgcctcccctgggacctcatttcctcatggaccttccattcccgtctgcacctcaaaggaatgacagcagctgttcttcccagagtggggatcccgtggcactgagaaacaggtgtcctgccccggccaagctatgtccccactgaaacccctttcccggctatttctacaatcagataatgtatttttgtgtgggtgttaccagacagaggcgcgtcgttcccccgctgtccggtcctcggcgggcctgggcctcctgtcccagctgcgttccttgatcttccccgtgagggaagcctgcggggacgcacaggggcctgcagcgcctctcactgcggctcaggggcgaggacgggggaggtgcccagggtttggggatcggtaggtgtcatgacgagggagcattttctggcaaggcaggtcacaccagcacagaggaaggagcggggccaggccggtgcccctggcgtgggatgcgcagggctctgcctgcctctggtctatcagtcctgcccgttcccagagccccagggatgttctcagcccttaatttagctttaaatgagtaaattaatccaataactaaagagcctctttactgcccgtgattctgataatcgaatgagaggtgtgccagaggacaatgggaccgcgcagccacagccagttggggcccagcccctgcccccctgcccttgcagcagcgctgaccgcctctcccgcgccctcttctggcgggcttgtggaacgacgggggtgatgcccagcagcctccaggtgcatctaggagggaggggttggacagcttccccctcccgtttctgagctgccctgagagccccaacccacgtcactggcgtccaggagcctgtctggactctggtcctgatgtgcccagcgtctccctctgtctcttcagtcgttggagctgatccgaaagcatggcttctccgtggctttgtttgcccccggctgggtgtatgagtgtctggagaagaaggatttcttccagaaccaggacaagtgagtcctgctgtcctgggtgcttagtgcaggctgatgggagggaggggtttctggtgtctctgataggacacgtttgtgctctttagtgacccttcctatgggggggtggttaagggaggatgacaggggaggaagccagcaccctggctgcttccgggcagggaccaaacccagcggccgcttcctgcagactcgtgtttgcagcgtatctgtagacggggaggctgcagtcctcctggaagtcctgtcttggagggtgcaggagagcctcgagtttccaccagcaagtttgagggacactgagaggctccctcccttcctccggaccgagctgttgcccccatgtctctggcaggttctggggccgactggagcgttatctgcccacacatagcatctgctccttgcctttcgtcacgtccttctgcctgggcatgggtgcacggagggtctgctatggccaggtgggtgggtgtcttccctccgtgtctgtcctctggcctcagctgggacaggtgggaggagcctgggacttgccagcaggcacggtggtggtcttacccttccctgccgctccgggcacccctgctctgttggcctctgctgagtgcccctgttctgcccttttcttcaggaagaggcggtagggccctggtaccacctgagcgcccaggagatccagcccttgtttggagaacacaggctgggaggggatggccggggctgggtgaggacgcactgctgcctggaggatgcctggcacggaggcagctccctgctcgtccggggtgtgatcccaccggaggttggaaatgtggctgtgaggtgggtgagtgacggaggacggtgggcccaccagcttctcccatcacacgtggtggccatggaactggacagatggggcagtggaggccagaacaaggacagaggacagacccagatgggttttttaaaattgtgatcaaaaatgcattaacgtgaaattcaccatcttgaccctgttgaagtgaacggtacaggagtgttaactctgcgtacgttgctacgtgacagatccctagaactgtgtcatcttgtaggactggactctccccattgcacattagccccccatcctcccccagccccccaaagccacccctttactctgcatctgtgagtttggatactttagatgccccatatgagggaatcccatacggtatttcagaactgagatgtttcagcccacaaaagaatctggccttgggggaggacttgtcccctggctacggacaggaccacgatgtgggagcatttggcacccaggccccctgttcctggagggaggggctggtggacgcgatttggagctggcttcgatttctcagtggtctctccacggcacccatcacaggacctttttccccaggttattttccctgcaggccccagtgccacccaagatttacctgtccatggtgtataagcttgaggggcccacggacgtcacagttgctttggagctgaccacaggggatgccggcagctgccacatcggtggcatctcagtgttgaacggtgaggtaatggggcccaggcctgcctctgcccagggcggagagctcagggaagagaagtgtggagaggctcctggggtgtggggaggagctggtgtggacagtgggggggtacatcctgcctttgccggagtcagggcagcttgtggtcaaggcctggacagggaggattcacttctcagccacagcctctgtcctgtgtcctcgtcgggcagctgaggctcctgtgcagggtggacatgggcccctcccagagacctgagctgcacagccttgctgctggccgtggcgtggagaggggcgagcaaatggggtgggggagacggcaggctggagggcgccaggacgagtgagggcgcggctgaccccagacacgcatttccttcaccgagctcctccggagtccttgctggttgcttcttgggacccgcgagcgtctggccgaatcaggcagccttctctggactcctggggcgcccttggtggtccttctcagtgccttttcctttgagattctcctttttcaagttccgtgtctccttctgcagcagaaacaagctcaagacacagcctccgacccctccgggtgccccccaccaagctggccagatgggtgggccgctgcggccggcagctgagtgggggctgggtccagcagtaagtccctctgcttcttcacgtccttctccctcactcaagtctctgttgggaaaccccagagctggagggatggaggggccctgggctggcccccaggttttgggcagctctgagacagaagcccaggacagctgctgggagccctgctgtcggcctggggtcccccatgaccctgggatgcatctcccttctgctgtggcttggggcctctggacggctcaccctggagcctctgggctgagcccggccagtgatcagccctttcgccccgtagctgctacgaggtgagcctgcgtgggtgcctgctgctagacctcctcgtttgcttctcacggccgccgggtagtcgggaggaggagagcttcacctgtcggcttggagagatccaggtgatgcttcccagaggggctcgggctgggctggctgtttgtccagctggagtgggggtggaggccgccccaggccgcccccttcttgggttcagcggggaactggggtggaggagtcagggaggggaaatgtgtgcgtgggggcaccctctccccgcccccgggcgtccagccgtgctgagccttctctcctgccaggtggtggacgctgccagcctgctggcccctctgccccaggtgcaggccgtcaccatctctcacatccgctggcagccatccgcctctgagcgggaggggccccctgctctgctccagctcagctgcaccctgcactggtccttcctcctctcacaagtccgttgcttccgaatccactgctggggagggatgagtgatgactctccgggcagggagctgccgaggccagagatgcccatgttcctggggttggcttttgccacccagtaccggatagtggacctgctggtggaagccgccgggcccggccaggatcgtcgcatggaatttctggtggagcctgtccccaaggaagggttccgggtacctcaggccgagtggggcagggcagttctgctttattcagcccctgcatgagcggatgctaaggccgggtggtctcctggcctcgggctgaggcctcttcccggctgtctgcccctggcctgcgctggacctgctaagtgcccacagtggcagcgaggtcccggtcccggggctggggtgggagaccccgggctgagtgctgtggctttctggtggggggcgatggaaacaggaaaccaagcagtgggatcgcagcgttggtcactgcgaggcgagtggcgggctttctgtttctgccttgtccctccccacggtacctggttcccaggtgaaaatgaaaggaggggagaagttgagaacagaacattccataaaggatatttcctaataggctgcaagatgctgatgccgagaatgatgattttctttcctgcagatgaaactattagaaagggtcttagattgtggcaggtaggctttggagcaggcgccgagacatttctgagcatgaggacgagctacagcagctcctggggtggggctgcctgcgggatggcgggagaggatgccctggagaaccgtcctcccagtgtggaaggcccttttccctgaggagtgggcattctgggccagccggcgctggcttcgtgcctccacgtgggccagccccagctgctccgtgtttcctggcgttggcaatttactgtgctgctgagtgtgaggtcatctccggagcgttttcagcagcccctggctctgcggcgtctcttccgggctgtgggcatgcagggaagtggctctgaggcagtctgcgctgtggccctgcctctgcccagcgagaggccgtgggctctggacaagccgcccttcaggctggggtagcaggtcagtccaggcaggaagcagcacctgccccccgcgccagcccagccccagcctgagtgcaggagctgcaggacccgcgggggcttttccagctactctgttccttcacgtcctcccttctcagcctcgtccaagcaccgggaagacctccaggctgaccccttgagcagcagtcagcacaggtgcgtgggggcgtgagggaggcagggtcttcaccacaggcgccttcctctgtccttcctgctctttcttctctgcccaggccgctgcagctgcacagcctctgctacacctgggctgcctgggaggcttcctggtgtggtgtctggaccccacggccttgggtcatcctgtggctggtctggggtggggtctgttgtggtccttccacggtgtcagtggcctgaagtccctcgcttttggggggggggtctctcacccccaggccacatagggccagtggtaggggttccctctatgtcgggcagtgctgagggctgggatgctctgtgaccccagctggagcccacacctaagggctggcatccacatcatttcaccctgcagtgagggaagaggccaccaggtggcagcacagccacacccgttcccacgtcagaggagggcaaggctgggtactcagcagccactctgagccggggctccttccaggagctgaaatccacctgtctccatcttccttgcctgcctgggtactcatgccaagcagagactgggattaggggttctgtgctcttgcctaattaggaacattctcccatgtctcttgtgtggtcccagaaggagaagtgagtttgccaaggatatggggcaggaggctccctctgctgaccccctgcagcctggagccagcccggggactgtcctgggtggagggcaggtgaacacaagctgctgccggggactgtcctgggtggacggcaggtgaacacaagcggctgccgcatgtagccactcactcgactttttttcagctgtgaccattcccgggagctctttgagcctttctgtctcatttggaaccagggggaaccaggaaggggctcctggcctctctgtgtcctctgcagtgggggttgtggggggcgcagcatccacgccttgctgcccttctttcatgaagtctgttttttaagtgctggttcccccgaatattttatgcagaggagggaaaatttatagtggcaattattttctcacagtctggtgagcaggcaattaattaggagtaagggggcctagtagagcgtggcgtgtggcagaatcgcaccgccccggctccccagcccaccgccatgcagggctcgcgtgcgggaaaactaatatgccggcgtttaagcctgtgcccctctgctgggtgtaactgcgctgaaataaatgatctgacaatgtgaagcgtgcagtcgagtcctggtgtgatggggcgcgggcagcaccagcccggccctggatgctggctccctgtccagccctggccccagccccaggcttctgagctctgggttcaggttctgccactcgtcttcccatctccccgctcagctgagcctttgcagctgtgctctagctcctacccaccttccaggaggggtgactggggctggcgaagtgggtttaccttgaagcaacatggctccttgtgggccccaacaactcaggctacaccaggcgtgcagaactggctggagcaccagccatctatgcctctgtgccatgtccccccaccctcccagctccgtgctctttgttgcactgggtcgaccaagcacagctgtgtggtcaccagttctaacctttctgcttcctggggtgcattctgctctgaggtcacgctgtgtccagcacatgctgtaaccaggaaagaagggaccagggctggcctcgacctgagtccgagaggcaggccaggcagcacagatatgccatgagctgccacccacccagcctatcctggggtgggatgcagacgaccagcctggacttgaggattgggactggaaagtctagggccttctgacaccattgccacctggctgtaggccaaggcagggctgcatcccgtcctggcccccgtcctgcaccctgggccgctatgccctccacccaccatgcccgggagctgccagagcatacagagttgtcctggtttgaagaaagaaatctttattaataatcttaataatactgttagtttgaatggtcacaccttggaagcatacagaatggtaagaaaggaagcccggggctcggctgcagtcctggggatctgagtgagtcggggggttgagctgctgcaagaaaagggtccggaacagcagaggggacagggggctctgtacagaggacaaagccggaggcagggcgtggggctatgtacaacgggaatagaaaaggagaattccatttcaatagctgatgctgaatagaaagtgaggtgtatttttaaatttttgacacttcatgagacagtggagccacgttgggagcctgtattttttgctgcttccctacttcagtgctccctgcctcgccaggggttcctccctgccacctgctctgctcctgctcctcccaccgggtaagcctggctgtccttggtgctgctcccgccacctggacacctgccttgggagcagggaaggggccggcccaggcttccccatcccttgcccttcccatgggcccctgctctggctgtgcccgtccaggcccacagccactgtgactcccaacctcgcgatgcagccgggcgctggcccgtccctggccctgggcgcccacggtggactgggctcacaggggagcggcagggagggctgggtcccagcaggcagcacgaggtcagccttggtgtacacaggccccgggcctcctccagaaagggagagatggccaggaagagcaagtaagtccttggcctcagggcccacttggccacacttggaggtgtgaggagtggctcctggctggctgggcttccttcgtcctcccatggagcgcccctgagtcctggagccacgtcagccctttctgttgggagctggccccggggctactgttggacggcttcctcgccaggctgggggcacgggcgggactgccgggcaggagggaggtgggacgcaggggacgcgacaggagggtgacggggcccagtggagcccctgggatgaaagctgcccgcacccctcagccccgccggccccctggcacagctggccacaaagatcaagtcttgctagcagcgcctgcctgctcaggcccgggcctgctccgccgccgctgggctccacactgtctgtcttgggagttgggggctgggaaaggaagactggatggaaaacagagccccccacgggtcccacaagggaggccccttcccctccaactcccccactgcctgagacggaggggcgtgttcccactgtgctgccagccaggacgcggtggggccgtcctgtcctggggccgctcctcggcgcccctgccggcgtgctccctcggtgcgggcgtgtggccaggacgcgggacttggacttggttggatgcctcttggtttggttggttttttttttgttgcttggatcttaacatctttttttgttttttttgttttgtgattttttttgtttttttgtttttgcccttcatggtccgagaaggaaacggtggaaggtttcactacaacagaaacagaaaggcaggacttgcagcttctcgggggaggcacagcaggtgtgaaggcgacaggaccacgtggcacggggcccctggcctaaagtcctggcgccgccacacctgccccccaggtttccaggaccctcatcttccagggctgagtgtgggtggatcccaggatggggcccaggcagcccaggatgggaggagacacctggggccctgaggaggagacagagctgagcagggcagggtgagtggagaggctgggccagcacaggcttcgaggcggcctggatgagatggcagagggtgatggtctggccacgggaggtgggggagccgggccccccacggcaagggcctggtgggcggcaggacttcagccctcactggtggggaacccacaccctccagctggccttccagccccaggagcccagccgtggcacactcagaacctgaggctacttttccctgtcatggaggtacagatctgtgtgccccaggccagtgccaggaaaggactgtgcctgtcttggctggcttttcctaggcaggccagcaagctgcccacggctgtgctcaagtgaggtcccagccagtgtctccccagaagcgccatgcaccgggctggccagtcccagggctgaggaaggagtggcccgcaggccacagggccctgcctgcagtctccctaatgcagggaggggactgacctggggctgaccggcctgcgctcaggggagggcctgagcaagggtgcattctgcccctcatcagctctcctgcctgctgaggacccctccttccggaatataccccaataaagacatttcgaagcttggggacagggaaagtaggctgtgcctccaggacaacccccttgcaaggctggcctggccttggccctgcggtgctaaggggctccctgaggagcgaccaggacgtgcctttccacatttccactttctgctgcagcagtgctaaggagtcgcagagactggcgtgaccacagcagtttgcacaccacgcgacacgcttgtgactacgtcggcaagaaatatcgtcaataaaatttaatgaaaaatattagtttcagctgaatggggcgaggaggggcagtggctactcctgtggttggctgggtgaaggcctgcgggagcaccctcaggccggggagacccacactgggtgcctggagcccctccctccctgcgtcagggtgctggacactagggccatggcacggggctggtcgggtggctttgggggaggccctgccaggcgtttctgttgttctgtgcagcctgggaggccaggaaatgtggctcttgccctcatagggcgctaccgctactcccaggttgggggctgcctggtctcctggcccagcctggaccccacggtgtgcacaccgtacctgcaatggcttgggtagtacaacatcaacaaagtcaaaataggaaatcacggttgcagacatacaggaaaaaccagggtcaaagacacacacaccagcacaggtggggtggggagaccaactggctggagagaaataatctatagattttagagttgcagggggccagccgtgcgtgtcgctgaccgggaggggtgcactgtcttctggtggctgtgcctggttttgggctgttgggtttggtgtgtaataggcagtcagtgtgaatgctgttaggggctgggtctcttgctagtagggggtgaagcggctgtaccctcctcggcagaggctagcctgcaacatcaaagatgaaaaacagccaatcagtaccgtcttttggaagaggggaaaaagcaaaaagaaaaaaaaaaaggaaaaacaaaaagagaaatagccaagtctcgatttctttccccctatattccttggggagaaaggagttgggttgtcatggcaacaggaagagtaggacctgcctctgacatagtggtcttgggccagtgtggggtgctctggggtcatggccaacagtgcttctaggtcacagcttgagttatgtctgggtcacttctctgggctcaggcctggcctctcactgtccttatgcagagggggggtcccagcttgagccccacctcctcgcaccccagcagggtggcacggggcatcttcagagcactgagggacctcctggcgggttcctgggccttggctcaagagcctggggccactgaagccagctacgctgggagaggcaagcctgctgggcatagtgttcagagccttgctctctgggggggtctctgggtcctcctgggcccacctgaggcccagccctgtcctactggggagagcgggtcctggatgctccagctctcccatgtcctgggctgcctccagtcagggaaggctctgaaggggcctcccaccctcccaccacccagttttcccagaaaagaacaacacagcaagtgcaagagaagaaaaattggggaaaaatagaaaatcttaaaaatacaaagtgaaaacacaagagggaaccctccgtgcgttaatgaaagcttttagcttgcagctgcacggagggcccaagagccagggtatcacacctccatccgggtggggccgcaccagacccgcgcctgtggctgcccacagccaccacaggctgctgggggtgtctgaggctcgttaaaaattgaaaaaaaaaaaaaaaattggagggagtcatcaaaaccaagaaagatgggaaaaatccatattgcctctgaacctcctccctcctcactctcccaagatgttttcatctttgatgctggatgccaagctagctaaaacccgtgttcacaccccggggctggggccagtgggtacaggaggcaggtgtctgctggaagcagctctgggtgcagagtgagctgggctgcacgtgtcaacagctggccacacacacacacacacacacacacacacacacacagagacacgccacgccgcgcacctccccgccccgccccttccaccccacagcctgagggaggaggctggggcagagcaggcactgtttccccaggacgccaggagcccccaggaagccaggagctagagcctggtgagaagcaaccggtaacccacactcccctctcggatgcgatgcgagggggctgcagcagtgcgggtgggccgtgggtatgcggtgtgggcagaaacagccccggggccttgggagcctctgctgggaaggagaggcggccctggtttggtttctgaggttttcctggtggaaatgggaatggaggggcctcaacgggactttattatagtgagggagctcagggaaacggatcaggcacattggggtgctttccagaggaccagatggtacggtgggctgaccagccattcaacctgcttccccgcaactgagagggcgtgaggggccagccctcccctcaccctaactcacatccaggccgtggtccttccaaagtctccgggaccaaggcattggtcagagggctcggcctctcccccaagggcctcaccacccatgcccagctgttaggactggcacccagggctgggcgggcctgggctccttaccatggttccaatgctgtaggtcgccgcgggcccgatggtgtgatggtacgggtcggcagctgcgtagactctgccgtaactagggaagagcgtgggagggggagtgggaggagggtgggggaggggggcaggtgaggggcagcaacggcctcccacctcctcccagacactacatgggcaccctgtaccgaggtcccatctgcaaggcaccctcccctcctgcaaggcctgcaaggcctacccctccttcttgttaagaaggaagcttctggaacacaacaggcaaccctctcaatatgcccacagtgtgctgaccctgacggggtggggggagggggtgtgttccactcagtgctacgtggagggggatggtgtcctcatggagctcgtctgcagggaaaacaaacttccaccccaaaaagaatgtggtaaatactggggagggtttcaagagaagagagagggtcaacgaggagggaccaggaacactgcccccaagaatgtgacacttgtgtccctcacgactttcccttcagcagtttgtctgtgcagggaactctcagctccttagagagcagagctgggccacggcaccctgtacaccacacttcagggagatggagccggggctgccaggagggagggggtacaagcggtccccagaccagagtggtggagctcagctaccaacaggccagatgtctgaggggaaaggcactaggctaggttgctccaggaggaagcactcaagcgtctgcctccaagacagacagccactgtgggcacggggcttgcggggggcggtggggggactgggaatcagagatgcggtctccacctggggtttccacagcctccccatggggtaagcaggaagtgactgaagtcaggggctcactggctcaagggccacactcagacctgctcccctgtcccgaccctactcccgccaggcctggaagagtgggttacgcctcctgcctgtctgggcccagctccccagggatccttgtccatcttctccccaccctgctccagaacagtgctggcccccggcctcacctgtcgctgtaggctgccgccgctgcagcgggctgagcgtatctgtaggctgcgtagcctccctgcagggtaagtgggaggagagagagcagagggacttagtggggctccccagggaaaggctgagtggggagaggagacagaccctgtgcgggtggggccctgggagggactacagaccttcccagcctcccagcctcggctgggtaaggattaggtggtacctggcctgggcacctagttctggtctaacacaggaccgaggactgcagatggctaggtggcacagttcagggcgaggcaggtctgcctgtccactccattcattcactcattcattcacacatccatctgtgcactccacacacattagcgggtacccatgactcatctggctgggtgctaggccttggcaaggaagaggtgctcacagacctgccaccaggccactgaggcctgacttggatgctgaggggctgggagaacccacagtgactctggatagtgtcctggacaccaggaagggtcaagggtaaagggcacaagaggacgtgagctcagatgatgtcctggcctcaaatgggcaggtaactgaattgtaggcagctgcccaggactgaagggtggctgggtacatggggtgtggccgtcagtgagtctgagacagaggaagcagcacatgtggccccatgaagggggagaaaggccaccggaccccatcaaggggggtaggccctggagcacaggcacccaggggccctgcctcctggcccctcttgcagcccgtgctgtgggtgccttaggggctcactcactgaccgcagcgtggttagggacgtggcagagtcccactgcccccattatatgaggccttgcccacaggaagatggtttcagctcacagggctgctgggcggcccattaactgctcccttgatgggtaccaacaaccaaactgtgccatgctgggattctcagggatgccatactctgggcagacgtggcaccctcgccctcctggcttcaagggtgggatgggatgggatgggaggagcgggcagtgagagaggagacgccgacttctcattgagacccacagaacgcctgatcccaccctccctcccggcggggctacacttacataaatctcagcaccataaaatccatcctgatacacgaccctggaagcaaacggacaagaaagtggtgggaacgctggagaggtggggtaggccggctccggtgtctgctgaggagggagggggcacggtgccagccccgcccatgggactggcattttaacaagcgtttgctccagtgccctgttttggtataacaatagagtaacacccttgctgatcagcaactttctcccacaaaccccggggcccatagcccacccgaccccaggcagctgtgccccccacccctttagtgatggagggcaccagaccccagggaatgggagcagagagggctcagagaagcccctcgctgacctcaagagtggacaacggccccattaaagcatccagacaaggttctggggctctgaatgtccccctaaatgccagtgacctccgcgatgcccgccgtggtggggataggggtgaagataatggaggcagctgcagggctgagttctggggctcccacgatcctccccccccccaggtctggaaaggctgcctagcccctcgcactgcgcagggcctccccatttccctcctccccgccgtcctaccccctcctccacgcctcccccggcccaggtactcacgctccgtaagtcgggatggggggtgggggtggcgcagcccgaaatgtattatacacggcccggccccggccccgaagatgtgcgccccggtaggcaacggctgtgccggtggtggggtaggggaaccccgtcactgcaggaaacggggcccgagacacgtgtgagaggcacaaggggacccacctggcaccccctccccgtacacctagcccccccgcgcacctagcccccaacccctccccaagccccgcccccggagcgctactcagtcaacacggcgacgggagggcggggacggcccacctggccccgcccctcatgccccgcccccagagcccccggagccccacggggccaagtagctggtctcatcccatccccgccccgccccagcttttacctgcatagaattcaggcccgtagactgcgccgaccactggatttagcttccagcctaaaacaaaggcacagagacctagtcactgccttccccgacccttttcccaccaaaacgtatgcctgggaaccccagcgacaccggtggagcccttgggaacattcccagggcgcctccccgcgccgggcccccctttcccacactgcccggacaagtgctgagttcaaaacaccagggtctactccttcctgactcttctgcctgggggtctgctaggattctttcccaattgtgatcctcctcagcctgcccctgagcaaccctcacccctgggcgtcatcccccgaagcctggggtacccacctcccagaagagaactggagagggaaagtggaacttgttatctacccccctgagcacagctgggatgagggtttctggagtcagactcagcacagccccaccatccgagctccaggtggccagaggctgcaggaaaggcgcttggactctgcccataagctctccccactgcctgccaaagtccccgtcctgctccctcttccccgtgctgagtcctgctctcactttcctcccgtcctcatcttcccccagagcggctgtccgggagggtggcctgggagcaggtcgaggaggaaagggcatttggactgggaatgataataaggatgggctggttttcctcaacactgtgtgtgagccacacagactgttcgaaactcacggggtcctccctgcccagtgagccaccacaccctccccattttgcagatgaagaaacagccctggagaggcacagcaacctcccgtcagcagctggggagtggcagagccagggatcccagcctgtaatcggcatcccagcctctcccttcctgcaggtgggccagtcttcctctccccgggggaacccaggagcagagcaaagacctgctccacctggaggcctctgcgggggacaccagctgccttgcagtgggctccggctccaggcattccgacaggttgggcaggagggcttcttgacgaggcccagccccttacccctcctcagtgtacccaggtcttatctctacagcatgccccgtgggcccggctccttgtccctttgcactgggtggggaggaacagcagggacgagagcccactggccagctggggagatacatctggagagggtggcagtgggcccaggccatgtgtgaacccctgacccagattctaacaaccccactgcagggcaggcagactggaggcagtgaggacggagggtcggggtatgttcctccctctggccaagtcttcaccccaccccgcatccccggcccaccatcacacaaccttgtgtctggacgccattgctgggactttggaatcttccaaaaagataaatcccaggttaggaaggaagaaactttttttgggggtaggggggcacagtttcttgctctgttgcccaggctggagtgcagtggacgatcacggctcactgcagcctcgacctcctgggctcaagcgatcctcctacttcagcctcccgagtagcttgggccacaggtgcctgccactacacccacagctaattttaaaaactatctgtagagacagggtctccctgtgttgctcaggctggtcttgaagtcctgggctcaagggatcctgccaccttagcctcccaaagtgctgggattacaggcatgagccactgcatcaggctgaaagaaatgttttgttttctgggaagacctccagtccgaagaactgactcttcttactagaaggcccatgatggagcagagtcctggagaccctgaccccaagcccagactccccggggctccatccagtgactcttctgggtccactctgggcgagtgagacttggaggctgcatgtgtgcttcagatggccctgggcaccttcacctgtcaattctggcttcctggatgcctccaccggtgattctggcttcctgggtgccctcccctgtcaattctgcctctctgggagcctccacctgtctctgctgcctccatttcactgtctggaaccccagatggcagagacagcctgagactgcctggctggcctgtttctaccgtaaatagttaacacctgggcaaacctggtgggtttgttttctacaatggaaacctccacccccaactgatgaattccagagtgttgggtagtgttgaagccaagtcacgcagcactcgccaccagagcccatgggttggcttcggtgccaacctgcagagaacccagggccgtcccactgcagccctctgtgcccaggctgatgaagagattgagatgaaacggctcttgctgcaaaggtgggcaaaggttcccacctccctccattccctgatgtttcactggtgtaggttccgtgcccctcatgagccgcatagcccgaggccattcagagatgggtctgttctgatttccatgctcccctgaattctcacttctgcccagacagcggtgggtgtggcccttgggtgcagagtgggcagctggttccagagattttgcagccccgctggttgatcacctgtaccctataaaaatgtctaccgcttttacttcctgtgccaagtgccagatcacagaagagtcacacccaggacgcactcgggatgcttgcaaagtgggaacactcccaaatttttaaaaagaatttgagatgtgtaagtcctcagaaaagcaggatatgaggccatgagaatcaagtctaacttgggccaggccagaggcccggccccaccccagcatcggacaccaggagaagagctcgggggagaggtggcggatcgggcggtcctgtccaggcttccatgctggttgtcacctgactccacgtatggccgatcacatggggggccatgagaggctgggggtgacaccgtctgaaagtccacggcaacagggagatccatcccgtctaggggcagcgctgaggcttctaaggggtccgagtgggaagctgctccctggcaggaatgagcggaggcccccaacgtacgcctgctctgctcaaagcaggccccttgccggatggagttaagactcgcagtggccaccagtggtccccctgcttctccagagccagcacttagcgtcggcagatccatctccaaggaagaccggccacctccgtttgcagtggggtgcacacacacaagattcctcagtctccccttgctgtggacagcagggctcagcctggggcctcagggccacccatgtcaaaaagccccaggaaggcagttactgtaatcacatcctccgaaatctgagcacctccccccgggcccttcctcatggtgcttaaaggtgtcatttgtcatcgaacagctctgggggatggtgtcactattcctgttttgcagatgaagagactggaactcagagaggtctagaagctcatccaaggccccccgtgccctcactgccctccctgagcctgcttacactgggaatcggtgcagcaggtctcagcacagaagccttcaaactctggccctgggggaaagtcagtcctaatccaggaaggcacagctatccccctggatcagaagcctgcacgtgtggcctctgggggccaggcacgcctgggaaagtgagactccagctatggctgactgtatggggccatgagaggggtgagtggcccccagctctcctcccgcctcttctgccccacccgcttctgaccgggagcagagcggcagccccagggctgggacactggggacggaggctgcctaggatccaggaaggtcagcctgcagcagcctcagctcccccagggcctctgtcccagccagtgaccccagcagccttgtggggggacccagccccttaccgttggtgtaggggttccccgtcttcttgttggtcatcactcgggccgtggcattattgacctgttcaaagagggaaggagagagaggaagagggaggattagcctcctggaagacccactggccactcctccccgccctgctccgttagcccccggcaccccccgccccagcctcctctctccaccatgctgcctgccctccgggagccttggcccccactgctcccagcacgggctaaagccccgcctggcccaggaccccagacccaggcctgctggcctgtatccttcatgtggctgttcccataaacccagccccaggctcccaggcaccccaggacagctggagcagctccctggtggactctccacagagtgctctctgaccagaaccagctaagaggctggactccaggatgccccctcctccctgaggctgccaaggcccacctaggcatgggtaccaagatggccacatacccctcctggatgatgcccccctcccccgaggccagagtcctcaatgctgcagagtacagaggtctctgatggggcccgtgtgcccctggaggacgaggccgacagggaggggggctctgggcacgaagtcacctattttccacacatatgcctgggtgaggctgtccaggggcagcctgggatggagaagacgaggcatgtgtgggagggagtcgagaatagcaggggtgatgggtcccaggaaggggtctgggctgttctgcctcccctgcgtcctccattgagccccgagggcgtggggctgcagcctggccaagccagtgccttcagaagtctggaaacctcctctcaggcccttcactgcctgcctgagggctctgtcatggtggctggccccagccctcctccagccaccctttggctgccctgcctgttggggtacccagctccagacacccaggccgcagcaagggaacacagcccactggcactctggacccctggggagcagggaaggaggggacagagcgggatgggtgtcagggagggacccagggcccctctccctgctcctccttggggcctggtctcttcctctgccctggccattgccactgctgcctctgcttctacccaaacaaggggtggagtggggccaaggtgggggcaaactgcagggcccagactgggccatgtggggacaggttggggacagccgctgctccatggtgagcagggtctggggattaatggctccttggccgggtgggctggccatggtccttgaagctgccaagccccaaatacaggatttctggggctcctccagtgtctggttggggacagcgcctctcctaggaaaaggagggaagaggcaggggagaggggacctcgggtgagcctgaaggggtgacaggtgatagggctcagccggcagctgagcaccctggccttagtgcgacccttcctcccaccccagggaaccctggccaggctctctgaagggtgcggcagtggcagggctggttggttgggggagctggggggcaggtgggcgatcttggggcatccctgccgcagcacacttatctgagcacctcaattttccgtccctctacgatcgtcccattcagcttctcccgggctcggtcagcatctgagctagtttcaaaagttacaaacccaaaaccctgtgagcagaggagagggaaggacaggcacggagaggaggacacagggcgagaaagaggaggaagacgaggaagaagaggagtgggaggggggcaggggagtggggagagagagagaaggggttgagtcaggtgagttgaggcagagacgcaggcagcccagaggtctgtcctagggccaccggcaggatgccaggaggggtatgggccccaggggggcagctgctgacccagcctgagcccagcctgagctgatcacccggcatctccaaagggacaggccaaagccacataagagacgccatacctgaccacaggccaggcctgccccctgaaccccaccttggggtagggggcccaggctgggcttcaggacctgcaggggcagcccacccatctccaccctcggagcccagggtagagggtcgtgccttcctggaaggggagtagggcttgtctccgccggacaccctccccagcctgccctctctgtagcccctccctcaagcttcaaggccagtggtcccctggggtaagtgttcagtgggggtggggcccggacctggggcccagggctctggggtgcaggcaagaggtcctggtggctcagaaagaaaaagcggcagcggcagcaacaacacagacagctggggtgggggcggggcgggtgggggcggaagagcggggaatacaagcacccgtgtcgctcaggggtcctcgggcgcgaagctctccaggaaggaaacgcacatttcacacgttagcctggcgggacctacagccggcgctgtaaggcggcagctccgtgcggcacccaccttggagccccgctcgttaaaaatgatctccacgtctaaaatttttccgaattgctgcagagacagagacaaagagggagtggggcagacaggaaagtgcgggttaagactgctggcccagctgcccgctccactcctgagacgctcatgcctgtgctctgccctcggcccccagcttgggaaaggagaccggggaccccctcccacccctggccatggagcagctgggacttggccacttggagaaggcgatggtggggatagggtgcccaaggcatcaccaagagggtccttggtgtggtgtggggacagggacagctctcccagcctctcctggaggcccgtgtctcccttctgccttggggagcttttactgccaggacactaactccagctgccagctgggcatgggggtaggcacatcaccagtgtcccctcctcaccctgctaggacatggccacttggaaagggttacagtggggatagggtacccaaggcatgactgccccacccctaattcacactaaagggtaaaggtctgctttgagacccttctctaaaggatgggggagagggagacagagggacatgagtgtccattagggacaaagtgccacagagaagagaaagtgctggggtcaggaaatggagactgaggccaccggagagcaggacccctggttgggaaatgggaccctcaggcctccctgagatggggaggaggttgggcagggggaaaatggggttgagggtgtgagggcaagagggaagcataggagggtcttccgcccaggcccccgggaccctgcacagcctgtcatggggctgtgctggcgtgcggtgctgagcaactgttcaggtcgtttgggccagctgggccatgacgctctagctgccttcttccctcccattgttggccatagtccccatggggcagccctgtctctctcactggtactgagaccatgagcctgtgaacagccccgaacaacacttctgaggtccccagggcctgtcctgaagcctgcagtgcaggcaactgatgggggtttcccagtcacctccacacagtcctggaggcggggggtgcagcaagccccagtggggccagacagcaatgaaatcccaactctgccaggtgctgaaaagagggggacagtaacctccgttctgcagggacccagggagctgatgggggacagtgtccccatcctgcagggacccagggagttgatggcggatggtgcccctgtcctgtagggacccagggagctgacaggggatggtgtccccgtcctgcagggactgagtgtatgtaaacaggtcccctgcagggggcatccagccagagctccaaaatgtcagctgctattaaggggcagccccaggcccagagaaacctggcagcttgctcaggacccagagtcgagaagggacagagtccttgccatctgatgattctaagtcatgccagccctccaatgagtctagactgcaaatccaaccaggccgggctcctgagacggggagtggacttctagggatcacgtcagggggtaggtgaacggggacctctccaccctggggctgccagaggtgcttccagtctgcctgacaaatcccagctgggtcagggtggcatgaggggagaggctgggattcaggagccagaggctgtctacctgcgcagcagaggtggggtgggcaccgtggcaggcaggcggaagagaagtttggagggagggaagaaacacggccgggctgcgtggtcctctgtggccagggcaggcctgggagcctgggctgagccacccagctgctgccgctcacccaccactcggcagccccagccccctgcaggcatcaacacctgcctggcgcattcaagtccaataacaacaaagtgacccaggacccaggggcagccctgcacgttctcacggtgaccccaccacggggctgaagcctacagtgcaaaacccggaacaggccctcggagtccagcaggggcttcacttcccattgactgtgcatccggttccaagttccccacctgggggcccgggggacacaggcccggagaggttgactgcccggcccccgggcacacaagagaggccagggctggggctgctgctctatgggaggttgagctgcccctccaggtaccctcttgcgaggagacaggagccagaatgtgggaacagggcggtcataaccaaactggctgcgaggtcccaaggtactctaggaaacccctgagctcaggtggtctggggggcatgggtggatttctggctgggagcaggaggggtggggtttgaggggcagccgcaacagatccccctactcctcagcttgaggccttcctcttccccgccaccgtcccagcaggttcaggtcagggcagggctgggcccaggagggaaggaatcctggggccccggaggctccctgcgcagtgggaggcaggaaacccgggggaacaggtgtcggcaggaaggcagggcctgtgggcgccaccctggagctggggcaggtgtggagggcaggatgggtggggccgcgcacactcaccccgaacatttgccgcaagtcggggtccctgaaccggaaggggatgttggagacgtgtagccgcttgggctgctgcttctctgtagggtcggaggggtggagcggctggctgtccgtctgtgccgcctcgtctgtctgctgcagggagaggactgggctgtggaggctgcctctgtgtgcggggttgcccatcccctctgctaaagggtcggcagagtctaaaggccagattctccccacccttctgggcctctcccccatccctgggctgggatccttggcagaatctgggcagacggttcccatgagatacagcacaggggcacctcacacagagaggccccacctctaggccttcgcccaaactgtgcaggtgaggccgcctccctcccgccatcccagtgcaaggcctcctggcctgctctgttccccgctcccgcagcccaggcctgtccacagaggctgaacctccacggtctcttagccccactgacatctcaaggcagttctgggagcctgaggaccccactgtctttcaagtcctgatgatgaagtggtgaactgcagacagatgtcggcctggcccgagggtccgcctgtccgaaggtgctgcccttcgtgtcccccatccctgccatgctcctgcttattccagcctgctgctgccactcagaacctttggggttcacctccagaagcctctcccaaggcagggcgtggccaagtccagtcctctatagcccccatttggacccaaatactggtgggcagatgggctcccaaagacttgggtctcaggaaacaaaagccacctggcccccagctcgctgtgagaaggcaggggtgtcgcccgaggcagcgcagtgtggcctgtgtgaggcttttcctgcgtggtcttctccagtggactggccgtgagctcacggcaaggctggccttcagtctggcttggtcctggctgtatccacagagcaggaactccaggcatgtggcaggtgcttcatcagcatcggccgggtggatgcacgggtgactgtccgaggtggccattagctcatcacgacctaggcccaggcccaagggcctctacaggccagttccatggatgcagccaaaccgcaggtgccagcctcgcaggctgtttgttttcccgctcagcccactggcaaggcgggtgggtggcacaggagcaccagggtacaggagagtccctcggtggcgacaggcacaggtggtgggtgcacgctccagctcccgcggggtgccctggaggggttctcactgtccacacttcctccaacaatttaagctcagctgcccatgggaacagcaggctgacaatgtgccttttattggcttccttcgccttcccgcctcaattccatgctgccccttaggggttttgggagatcatctcccaaatacaccctgtgcatttgaatctttggctctgggcctcctgacactcccagtggacagctggagaccacacacggagaacccctcctcagaggccatgtggcttctgggacaggacgccagccgaaggtaggagggtcttggctccagccgtctggatcctttctggagcggccgtagaggagactggggtcccttagaggcctacacggcagccggtacaaatggaaggctggtagcatggtctcccgtgtggcctgcggagcagaggcagccagcctgcgagcaagaggaggaaagccaagaagagaggctccagagagccattcccacgcatctccagctaggcgaagcacctggctgctgaagccactttccggagggcatctgtcgcgggcaaccaaaggagtgctgagttaggacggtgagtggggagcctggggtcacagggctggaggcctcggcccacggcaaaggaaatggagccagggaggcagagccgtgccaaggtcacactacagctaagtggccacagcttggtccctcgactcctgtctgagtggctgtccggctgtcgccgcccccagcacggccaccctggttgtcctttctggaaggacaggctgctcccctgcatttccgcatgtagccagaaagcctctgaccaggctccagggcagcaggtgccgctaggtgaccagaggggaagtcaccacttcctgggctgcgcagggtggtggaggacacagcctcccccgtaccacagcttcttccctggcgacagcccctggcactggcagtggggcaggctgggagtggggtctcaagggctgtagggctgtggagcacacgtgtccacgttcctgatgcagctctgtcccctgcgttgaacagcgaggatgcagcacacaccccacagcgtgggaaccgctgtcccgatgctcacctgggcatgcgctgcaggacctgtctcagcagacgcgccatgtggtatgctgtcccaattccgacaagcatgtgttctgagctgtacgtgttcccaaggtgtgaggctccgggtggatcctgcatctccctcaggaccccaagaggtggaaaatggtcatggctctcggagggcatgagcccccaggcttgggcaagctgggcggctgctccttggggttccctgacatgtgccacccccatcagtgggggctgagctttggcacggaggcatctgtggtgggcacagctggcagggccaggagggtggatgacaggcctccggagactcctggtctggctggcatcacgtccccagtgacgggcaatgcagggcagctgactctggctcgacaggggtatgcgggaggctcctccatccaagcctggggaactggagatgcccagcagcccagtttcccagttctgctgccatcctccttggtcccaagttttcttgcagaaagcaagcctatgctagacctccggaggggacgaccttacccctgaaccaaggcgagaccgtccaaacatccaccgatctttatggaggtctgaaccccaccctcccattggacaggcgtgggtctttcctcctcggtggacagggatgtgcctgtgccctctgctgctcttgggtacaggtgactgagtcatcccagattcaggaatccagcctggagaggggcacacagctctggcctctgagcagcagagggcgatggtgggaaccagccccgcgcccacccacaggcgctggggcatccaccccaaagtcctaaaggggagcagccgaggatgaggcgggaggaagggggtgatggggtgtgagtgggaggagccatgagtggggccaggacacaggtgaggaagaagccattctatccctgctcagccccgggcagaggctaagtgggttcaatggctgtgaaaccgtcaggtgtgcagggaagccctcgcatgactgcacacggactgccccaggccgggggatgggggccttcccacactgactgtagcggtccagcagcctccaccgcctttccagctttctcaggggctttctttcccccactcaaaaaaaaaaaaaaaagccgtctttgcttcttgttctcaaatgcagggaaagagaaaaggacaggactgcccttccctcccgactgggctgggggtcctgcttctgcatccttccccagctctgtcttggcccggccattatggacacctccccagcccactcaagttcggggtgggggtctagttgccacacagcacctcccactctccacatcctctgaggagcctgcacccactttcgcctggggcccccaagcttggcacggagacagacaaagggaatgagccccaggcagggtctggtagacctaggcagaccctggacagcaggtgggacccggtggctgttgttggcacggaaccaagctgtgctgctgtggcaccacatgaaccggtttttggaaatcccttcctcgacagcgccgtctcccttcgttcctccaaagacctcctaggcactcaggcaaggacctgccttggtgagccgctggtgggcagccagtcagccttggaggaggggttctctgcgtgtggtctcaacctatccactgggagtgtctgcttcagagcctggtggcactggtggcccctccttgggtgaagctgttggctcccacgtggcatttgaagaacacaggatttcaagcccctcctgatctggcctctgcaccgtggcacgggcagccgactgacgcctcatccactcccacctcccagcctgggtaggggcatctcagctgagcctcactgtggcgttgctttggggaccagcgcctcctctcttccgcccttctcaggccagtggccagccacggcctacccctcaccccttccataagctgtgagagccaagaacacagtgaccaagggctgcagctcctggctgaggggagagggccttggccagactgtgaagcctgtagttatagatgaggtggtccaaatggaagatcagggcaagtgcgggagtttccgaggaggctcaggcccgacggacagcagaaaggacagaggttcatcctggggctgcaggtcactgggcagagaggcctccagggacctgggcgcacaggcatctatgcctgcagtgaagccaggggtgcagagcccaggtccccagcaggcagtgagggaggtgctggcccctcagacatcaggcccttgcggcccacgtggggtcccttctggcaggtggaggagcccacgtgggctctggaaaacaccagtctcatcccgtctccctctacctggctggccctccacagtgaccctccgtgctttgtctggcattttttttatctgcgtgctaatctctctctctttttctcagagttttgctctgtcgcccaggctggagtgcagcggcgtgatctcagctcactgcaacctccacctcctgggttcaagtgattctcctgcctcagcctcccgggcagctgggattacaggcacgagccaccatgcccgattaatttttgtatttttgtagagacagggttccaccatcttggccaggctggtctggaagtcctgacttcgtgatccacctgcctcggcctcccgaagtgctggggtgacaggcgtgagccaacatgcccggcccgttagcaagctgagggtcccttgagcacaaagactcccaagggcccacagtactggcacctgcgtgaccccgagtgagtgaatacatgctccagatggtgacccctgctggggaacacagaccctgggggtggctcaaggtagtgagatggggtcccccggtccttccgcagcccctcatcgcactctgtaccctttgctgcttttgtccagagaaggcaggtgatgtcgtggtgagcggtgagagaaacggagcctatgtgcaggtgtgcgtgccccttgtgggttcttgtcacatgtcccttcccatcacggatgagcagagacgcccctgccccaccaggaaggagcctccgtatttctggacggtgaaaagaggtgtcctgctcagaggggaggagccttcctggggaatgatgtagctggaaagtcactgggggtggtcgggacccacccgagggtatcgagaccacaaaaatcagtgcacgctccgccttctgtgggaagtctcagtgtcggtgagggaccggtggcccccaggaaccccatgtttctctctgcagggtcagctgtgcttctgtgactaggggttgaggggtgcatcccacctgggtggtggaggtgtcgggaaaggccctgagttggatgaacacggacttcccaccaattgctggctggaaaccctcctcgggggaggaggagcaggaagaggcctcgtggttccagaaattccaggaaggcctttccggagctggggcccaggctgtctttgaggatcctggggtggaggagacggagaggtctgaggcatggggatgggctgcaggggccactgctctctcccatcgacgccatcagccccaggtcctagaacggaacaggctgcctgtgtgggcccccgggcctggacaggaccctgccgtctaggggccggctctgccacagctaccagtggggtgggtgatgtgggggctggacaggcactccaagctccccctctccactgccctggccacaccaactgccagggcagcccatgctcaccagcagaaggaagtccccttgggcgagagggcgggaagccccagtggcctctgggtggcatctgggtccagggagcgtccagggggttgtgtgccctgacctggtgccaacctgggcagcaggctctcggggggggggtgggctgggtaggacttcagggatggtggggaaggaagagaccagggtacttggtggctgcacacgggccctcgagtgccccgggagctcaggaagacactctgacctaggcaggtctggaccaaagctctgaactcatcccacttcctatcccgaagatctagaccacaataccaggctgcttggggcagggccaaggggaggctcgagtgagctgaaagggccctgctgatgacccagggacagggtctggggacacctgagccagcagggaggcgttcggccttcagctgtgagtgccgggcagcctctgggaggaaggagctcctggaatctagaacaccctctccagctgccttccaaggtaggaaggctctgcatgaacaaatactccaaggttggggagcgcatggcctctgaggaggcccaggtctttgttcttcgtggggcaccacgccgatgccgtaacttctgcctgcagccctgccctgggtgcaggtcatggaggatgactctctcctctgggtccctggatgaaagatctgcagaccatgaccctgaaccctctgccagacctgagagaccccagcctgaagaaaggaaggtcaaggccgtctgtccatcctctgggctctgggtgcttcccacctggacacgcttcctgggaggctctggaggctaataactgggtggtgagactcccatcctcctggttggagagtacttcattggatgcagcattcaccttttcagcagctgctgctcactcggggattctctccatggtctgtggcctctcacgggcaagccagacccaagccagcctctgtttctgactttcctgtccttgcgtggcaggaactaggggacagggctgggtcctttcttctttgtagcctcagtgccaattcagtgcctggaacacggcaggtgctcagcaaatgtctgccgagtgaaggaagactttatgtgtgtcctggtaggctgtgtctggtggccccaggtgtccaggaggcatctggcctcggttctgttgttcagttagagtgctaggtccgtccccaagctgtgttatctgtgtgtctgaccctcctgcttctggttttcttctgggacgaacccctgaggctcaccatgagagaccccctcgtctgtccataaggtggctgtcagaggtttgagcagataagctgtgtctactggagtcagtcagaaggagacccagcctgctctagcgtgacttgtttatggtgaacccggcttggctcctgggatcatctctgtcttttctaagcacacacagggcgtgggtttgatgaataagaaccagagcagacagggaagcttggcccctgcttctaccaccctggggcctggccttttccatgtgtgtcctgtggctgtaggaaccctgggtatcaggatgctgggggcgctggaaaggctgatggtctcggggcagattcgggctgggcggggctccaagcagggaggaaaggcaccgcctgggtgccagatgagggtcgggtccagcccaggaggtggctgggtgggctctctcggcagagggcctgggtgacgctggaggaagcccctgcccacacatgcaccgggggaaggctcctatctgcgtccacgcagcacgctgggagccaggctggacggcaggagggctgaggcagtcgggagggggacccccattgggagccgccggggcggtgccactcccgggcagtgcagagagctctggcctcctgcccagccccgccagctagcacatccagcggctgggacagggccagcggggacagttggatgaacctggagccccagagcaggggcaggggaggcacatggagatctcagtggaggggaccagacaaaaggaataggccggctggggctctggggggtgggtggaggcagggcctggtttttgtacccagagcccactccaggccagccgcttggccactccctgctggctctctttgctctcaggaaatctgagaagtgagggctcagcacttttgcctgggagctgcattacaaccacataattgaagctatctgattggaggccagccaagcaggtagattacaagtgattagaaatgataggagggcctgcaacccgaggcagctcggagggccctgggccacctccacggctctgcctctgccctccgcccgtctccttcactttccactaacaggtctctggcagcgaggacacctcccagctggggtgagtgtttgctcgaagcagggaagccaggcccaggcggctggaggacggtggctgccaccccacccctaggtgcccggccattcctccagatgcctgctcatcacaaagctccttggcgccgggggtcgagcaggggctggaaatgccttcactgggggtgacttctggcccaggagccccgtaaaaggcctgccctccacacacagaggccctgcccaggcccctcgcccacctggtacacctcatgcccttctgggccacccttcttctgggtgggtgctcctccctgaagctccagggctgggcctggggtcgtgggggcccttaccggcactgtctgggtcccggcgatgggctgtgtgctggcctcggagcctggctgctcggggtgggtctgtgctggtgtgtacagggtcatgccatgctctgtggggaccggggtctggccggagtagtcctgcgtggggtgcggtgggggcggggcgtactcggcagggatgccgttctgtggcggaggggggtactgggcgggggggtagggctgggccatcgcttcaggcggagccgtggcgtcctgatcgctctgtggaaggagagagagcaaggcctggttagaatcttgtccccttcccggagcccctgaggatggggccttgtggctgagcagagcttctccagcagtattttcagcagcctttccccggcccctccaaggggggctcgccggcatgggcaccagctcagagcaggagggggtgctgcgctgggaatgccggggagcctggctctggagtcagacacccctggagttcagcccatttactcacacttgtcagacctgggtacaagaacaactgaagggtttttgtaaactacctgattttaaaaaaattaaccattttaaggtaactgtaggctcgtgcagctgtaagaagtaacacagtgatctgtacaccttgtaaccagggtcctcacggtaacatccataaaaccaccaccagcaggatactgacatggattcacacaacacacagaatgttccagcagcatgaggactactgctcttccccttttagagccaacccatctccttcccacctcaagaattttaagccttgacaggtggatcacctgaggtcaggagttcaagaccagcctggccaacatggtgaaaccccatctctactaaaaatacaaaaattagcgggatgtggtggcacgtgcctataatcccagctactcgggaggctgaggcaggagaatcacttcaacctgggaggcaggggttgcagcgagccaaaatcgcactattgcgctccagcctgggtgatgagagcgaaacttcatcttcaaataattttaagcctcagttttgtcattggaaagcagaagtgagagggcggcgctgcccagcccgcacctggatccctggaagtgactgtgcagaagctgaactcagggcctcctgcctcccctgccagtgatggccatgacagtgaggtgtgtcggggggcagggagggttccagcctctgtgtcaaggatctctgaggaactctcaaagatctgtctgtgccccctcaaaggcctgctgccccaagcggggaatactgctcctgcagccactctcagaggctcttagaagcccaggcccttgggcaggaccccagcagcaatacagggcagtggttgtcaaagtggcctgggcccacagcatcagcagcacctgggagctttttggtgggcaatgcgggttccagggcgcaccccaggcctcctccagcaatctgcgtgcactgagaaccactgacctagggcctgagaagcagccctggtggggagcccttatgatcccaagaggagggctggggtctttcacagtgccagagagcaaggtgcaggcggaggcggcagagggaaaggggctccggcctcctccactcgctgtcctccactgcagacacagcctggggcccaggaccccctgagcaggcgaggcactcgcccccccaggagtctgcggtgaggaggccccactgcctggaaggacagatgccgcctctgcctggagcagcccagtgtgttaggacccctgctcagatgtggatgggtctgacgctcagccaccctggcagggacaggcaggagtccgcgtccttgctgaaggtgggctttgcggtggggaggaggagcgcccagcagggaagtggctgctcacctccctcacctgcgcctccaccccacgctcccatcacccggggccacgcacgctttgttcacaccacacacgttagttcagtgagcacctactaggtgcaggcagaggctgggggctgcccccgcagggcggtctttctcccgcttccctccacacccacacatccccctctgccgggctcctgtgttctcggcctctgggcagtgcctcccctggctaaggaggagcccctcatgtgcccatgctccctgcacaggtggatctggcatgtccacctctgtcctgcctcccccacccctagcctgtcctctgcatccttcattcagttcctacaaatccacccaacaactgttgatggggtacctggggtgtgccaggcccatgccagggcaggggctgtgttgacagcaaccccgacagcccctgctccctgctggtggggcctgcagtccagcgggaaaggaaagcttcagagaacaatgacccgatgtcaaaccattgttacagcactgagggctgcaagggacctggctgcaccagggaggtggccccaagggacggtccaaggctgggtgttctgcttcagacccggccaccccctccttctgtttatggccccaaaccctctgcctgggggcccagcaacctagggtgggtgcgcatagctggaagggtggagcctgggcaacccagccgtgccctgctccctgaagcccccagtgccggccggccctgggctctgcagcgggggccgtctcggtgctcgccaccctgcgacagactcgctgactgggaacctaaggagcagaagtgctgtcctcctcccatccccacccctccacaaagccagctggctccttccctctctctgcagactctgaaactggggcgacattcaagctcctcagccacgggagggaagcacacacgtgtgcatgcgtacacactcgtgggaggttccaggctcattgccccaaggtagctggtgaggccccatcgtccgttgttagcaaacgtgttggtgacggagtccagtgggaaggggtggatccatgagggaggaggagggggaaggagagtcagggcacccaggaggggtggagagcatctagaacccaggatggccagaggcaaaatcaggaaaacaggagcaagagaaagtgtggaaggcacagcgtgagggccctgcagacacaggggagatgaatttgctgataaatatttgattagagccttcaccgccttgcactgtcttcccagcaaccccctcctccacctcctccaaggcctgagaaagagtgggctcctggttgggtgcagtggcttattcctgtaatcccagcactttgggaggctgaggtgggaggattgcttgagcccaggagttcgagaccatcctggacaacacagtgaaaccctctctacaaaaaataaaaaaaaaaaaaatagccaggtgtggtggcacatgcctctagtcccagtaatgtgggaggctgaggcaggatcatcacttgagcctggaggttgaggctgcagtgaaccaagatcacaccactgtggtccagccagggtgacagaggaaacccctgtctcaaaaaaaaaaaaaaaaaataaagaaaataaaataaaaaagaaagcgcagctcctgtcccatctgcttccttctcaccctacctctaaccctctgcagggctctaatccctgtcattcaacttggggctgaatgacagctgccaatcactctcacttgaggttctgcagggctgaagcccagagccctgagctaacaaatgacaggcgaacccgccaacataaaggggggagctccggcagtaggtgccagatctgagggcatctgtggtgggcaagaggtccctagcagatggggacattttagggacatttgtgacactagaataaaacagcatatttgagcccacagtgctccctgcttttacagacgctcactcattgagtggacacttccccctttcccagctaataaaaccgaggtgtagagacaaagtgatttgccaaactagtatgggaggaccccagagagcagcactggcagccaggatcccaaacccaccatatgcacctccacatggaattgtagccctgcccagggtggtttgcaagggagaggaggtttcacagccaagcatcggggtctagaccctgcaatgcacggggatgggctccaatgtcccctcttagccaccaggtggtcctggtgactgtctgtcctctctgcacaggtttctccatccgcaaatggtcacaatagagcctggacagaggaaatgcagaatgaaagccagccagcgtgactcagggggtcttagggtgacaagcaatatccctgccctgtgtgtcctccacagctgtgctggtgtggctgtggtcctgcaagcggctctcagagctggctacacatcccagtcacctagagaagtgtccacacctgggccgcactcctgaacaacagaggccacttacaaccaatgtttcccaggagactgacatgcagccctggtggagagccccagaccagaaaagcaaagtgtatcaggcccatcctgatagggtacgtgaatgcccagcacacagaaggctgtgcagccagtatctgtcccattgcttctcttcttcccaggtctgctagggtcagagtcaatgagggcctggggttgggtggtgtgagcggaggagttcctgctgggctatggggcttatctcagatgacctcatgttggaccagcttgtggaaggatctggttccccaggggactgtacattctcagagaatggggaccacttcactcaccctttgtccccatatccctgcactcagcacagcaccctgttctactcagaagagtctcagcgtacaagaacgggtggatgtacgtacgtatgtacgtatgtatgcatggatggatggatgggaggggtacatgggtgggcaggtgggtggatggaaggataaatggatggttggatagatgggtggatggatggattaaagggtgggtagatgagtggatggatcagaaggtgggtagatggatgagtgaatggatggatggaagggtggataaatgggtggatggctgaatgaatgagagggcagatggatgggtgggtggatggatgagtgcatggatgaatggatgggtagatggatgggagggtggataaatgagtggatggaaagatggatgaatggatggaaagaagggtggatgaaaaattggtgggtgtgtggatgcacggatgaatggatgggtggatggttggatggatagatgggtgggtgggtgggtggatggaagggtgggtgggtggatggatggacagatggataaatggatagatgggtggatggatagacggatgagtttaaagaccatggataagttgttatcctcccttcctctacaaacttgcccccctcttctatcatcacttgtgcctggcaaaactggtaagacccagctcttcctgctctactccacagcccacactgaggcagataaacacaaaatcaccctgaatgattcattcagaatccatgaccaccccctgccatgggccaggcactgccattcagctctcacgacctgaatgttgatttcacccttcctcctcaaccttccaaatattctcctttatcctcactcttggtgagaccttgcttcctgttttctaggaaacaggagacaacatccacattcacctgcccacctccctgcctcgtcacctacaccaggccctcccttctgtccccagggatgagcatcgtgctcccagacatgaccaaccacgtcacctgtacactagaaaccagcccttctcaccatcatatgctcacatctctggcaattcgccccttgcactccacagccatcaatgttttcctcctgccagcaccctgacaggctgcagtctctcccgtgacagggaaagaaaaccctccttgacaccatggctccttcatcctacaaactcaattcaccacctcccttagagcaaaacttcccaaatgagttgtctatacctgtggccccaattccctcactcccattctctcttggtcccactccaagccagtgttccgaggcaccattccctgaagccacctttgtcaaggtttttacatccaccatactgaaaatgcaatgtgaccattgcaatgtgactgatgtgtccagtccttgtctggtctgggccctcagcagcattagccatagttggtggctcctctatgtggagacacttctcttggctgcactgccccactctcagttggttctattttactggaagcttcatctgcattgctgattcctgtctatctctccaacatctggatactgatgggccccaaagctcagaactcggacctctttcttccctgtctatgctgactttctgaaggttttgatttagtctccaaattaaaaaaaaacatctgtatgttgacaatcccaaagttttatctccatcctggacttctccccagaatcccagctgccccttgcagtctccacttggacatctgatacactttgggggtttgacgtgcccccaaagggacctctgacctcctccgcattgcccccatcaaacccatctctgaggtcttccccatctcaggaaacacctgccccccagtccagcacatagtcctaatctgggggtcacccttgacttggctcttttggcccacacaccacaaacagtccagtagcaaaccccacaaacagtccagtagcaaaccccactggctccgcctccagccgccctgaaccgcccactgctcccaccttggtcgggccgccatcatctcctgtctggtcctcctacttcctccctggctcctacactctgtcctctgcacagtagaacccaaagtcctgagacggcccctcccccaccagggtcctgcacgacccctgctcctgcttctctcctcttgcttgtctactccagccacaaatgtctccgctgttccttgaacgtctagctgccacctaaggaatttggcacacaggtgtataaaaaggtgctcaccatcattgatcatcagagaaatgcaaatcaaaactacactgagatatcatctcaccccagttaaaatggcttaaatccgaaagacaggcaataacaaatactggcgaggatgtggagaaaagggaaccctcatacactgctggcgggaatataaattagaacaaccactacggagaacagtttggaggtttctcaaaaaactgaaaacagctgccgtaggatccagcaatcccacctctgagtatgttcccaaaagaaaggaaatcagtatatggaggagatatctgcattgctgtttattgcagcactgtttacaatagctaagatttggaagcaacctaagtgtccatcaacagatgaatgggtaaagaaaatgtggtacagatacacaatggagtactattgagccataaaaaaaaaatgagggcctgtcattttcaacaacatggatggaactagacatcattttgttaagtgaaataagccaggcacagaaagacaaacatcgcatgttctcacttatttgtgggatctaaaaatcaaaacaactgaactcacggacacagagagcagaaggatgatgaccagaggctggaaagacgaggggggtgtgggctgggggaaggtggggatggttaatgggtacaaaagagcagaaagaatgaataagacctactatttgatggtataacagggtgactatagtcaataataacttaattgtacacttaaaaatcactgaaagagcatatttgtattgtgtgtaacagaaaggataaatgcttgaggaggtggacaccccatcttccctgatgtgattatcacacactgcatgcctgtatcaaaacatctcatgtatcacataaatatatacacctactatgtacccacaacaattaaaagtaagaaaaacgaaaaccctgctggcactccccaccccctctacccccagctcagttctgcccttccccctctgagtgcctccaggtgtccatgatcaccgtctgcctctgcccccagaactagtcaggagaacaaggactttgtccctcctgctgctgaatctccggcatccagagcagtgtgtcacacacagaggggacacgctaacaacggccctaatggatggatcaatgcccagatgaagaaagacgtctcggtgggcgtgctcgctgaccaagctctagtgtaccccacacgtgccatctcatcgaatccccacaagcctgtaaggcaggctcagatgtcagccttgctctgcagatgaggcttgggcagccattcctatcgcacctggcaggcaggcggcaggcagtaaagtttggccagcccccgccttcaggggctattgatgcaggtggggacgtgcaggaaacccggctgtgctgcaggcctgctctgtgtccactgcctcgcggccatcatctcatctttacttaccattcctccatgtggtcggtaccacgaacgccatttttacagaggggccaaggtgcctgcccagggtcacagagccaaggttctcacatagactgccccctcccacacactctactgcacacaccctcttcaacacagcaggcagggaagcgcaagatgagttggcatggaggtggcggctggctcatcccagcatgtgagtgccactgggcatgctctttacaactccaggtctagtgaccacactgggagtctgaaatcagccctggtgggagcatttacaccacaggaatcggcaaaggctgcacatcacacataagggctggattgggatttgtcacagaagagagggttgttagacatttaccggcacgccactgcccagctcccttcaatcacacagcaaggtgaccaccatggctgccccggaggcctgaacgtgtggcagataaatgacactgaacgaggctgtctgcaaagactgcactcgacattttaaaatcaaatgcaattcaagcaacagttatggagcccctcctctgggcctgtatttagaggtgaacgagatggggccttatacactagaggatttctggtaccacagggaactgaccattcccagccagcagcagcaagggctggaaggtggtgagctccataaaggctaatgtccacgtgtctggcaaaagtgaaccaggggccatgacagagagggatggcaccagctcgggtgtgggggcagagggaaggtgttgcgggggtgggtggccagggctggccttgtaggcagggccagggctctgggagtggctggcctgccaggcccgctctccaccccttaccccgcctctgctccatgaacctggcagcctggcctggacctgtagccctgtggcttcctggtgacagtggggggtgggagaggagtgtgggtctggtgtatttggtcccctggttgcccactgggaggctgtcgtcggctggctctgtcctggaccatggtggactgaccttgtctcggggggagcccagtccacgactctccccactccctggctctagtcattgcttcctccacgcgctcctccgggcctggcgtggtgatggctctgtcgtcgccagttctggggtcctgtgctgtccctggtggtccctccaaccctgacctctagacgcctccttgaaaataaactcgtctccaattatccgggaatgagcgagccacctgctgcctgttggatcctgatgacatgacggtgtggggcgagggcttccctagcccaggacaggcaggtggggccctgagcaggttggggctgtggctggctgtctgagccacagggcctcgcctgggctgtgctctgggtgtacatgtccttggtcccaggaccctgtgcactagccccaccaccactttgggcctcagcaacttagtttgtgggatggggacaatgactcatctgcctggaggcagggccgggcagaagcaccctccatcttccagacctagagctgaggacccccagaggtgtctgcccacgtcgctggcccagtgtgttctctacccggcctatcccttggccaatgtgctctccggtcctgcctggtaaggtcccccagcctgcgtgtgggacaacgggccggcagggagctcagggagcaggcggcaaggagacaggctggccaatggtctggccgtggatggagcccctcccgcacggcctggccgccttccctcggcacagcccttcctggctccctctcctctcaggccctccaggacaatgaagctaattgccttcagacggctcccgcctgcgggaagggcgccgcgtggccctgggccggcggggcaggctgcagtgggagtgaggctggtggcgaggctgggcaccgggccatttctccagcacctctgggcaaagcccattccaggcagaaatggggaagggagggagggggaacgccaggccccatccgccgagctgtgaggtgtgtcacagcctgtgccacccatgcaggtcacctgcctgcccaagaggtgagtccacccacctgcagatctgtgctgccctcaccctcatagccactaccaccccctgcacatttaattctcctgctgacctgcagaggtggatgtcacaagctgagtttcacagaggggacaccgaggccagcagctatgtgttccgtgagcaggaaagcccctcaccccctccccacgatctgggacacctcagacttcctggacgcgtctgccacattcccagtttgaatgcggttggaacacagacgtgtgaaagtctggtgtgaggagggggcttgaggctgtcagccccacatatccctgtgatggggaccagaacaggacagacggatgtccacttccagagtctggggtgggggccagagccatctcaccaagagcgtgtggtgccctcatgtggcaggcggcgattcacaggcaggtacccgatgtgagcacccctgcccggcccacagccctcccgagatcctggaggaatctggtgttggaaggggaggctggtgacccgggggctgacctctggcaggtagggggtgtgggttccagtccctggggtccctgatgatggctggatcaggtgacctcattactctgacctcccctgcctggaagcaggggtggtcctgccctcctccctgtctatacacccaagggcgtgcaaacgaggccccatctctctgcatggcagggagtctacatcctcgtctctggctgcaattgagcaccctgaacactccttcagttctagaatcttagaacaggtagtttctgcaggagacacccagcccagcccgccagacaaagtctcctctgttccctccctgaccggcaccccggacctctgctcaaacaagcctcctgaccggtgctttactaacgaggaggctccttcagtccacctcagaacagctctgccactcactgagctgaaatctgccttctggaaacttccacccggcaccgggctttgcaggcatcccacagcctcctcttcgcaggctggtcctccaagaacgcacagaatccacctctctagtatgtttggcttgggtgaagcctccagtttcctgagtggccaactgctaccagctttgcccatcctggctgctcctcagcacgactccaacgccacattcactcccaacttacaggtcaagagtcacaggcaaatggctctggttggatctgaatccgggccagccttccaaattatcacccgacgtcaccatcatgcaggtccgggtgcacccttccttcctgaggggctgggagcagcttcacttcttgatacctgagtgcagaaaggggggctccccagctgtgcctgcccaggtggccagttcaagagcagagtgggtagtttccacgagccagaggacaacccagagataacgcatcaacaggaacgatgagagggagacctgagggagaagcaggtgtccagagcggtgagggaggagaggaggtgggaagaacggaggaacagaagaacaggcatttctagacaatgcatttgcttctattttcttgcaggtgatgctcctattttcttttctttttttaatgtgcatattacaggtcaaagaagttttagggaaaataaaagattatctaaaacggatgaagattaagctggaaaacatgatgatgtcaagggaaggcccaggtgcccccgaccggcgcccttgagcccccgcatcagaggccggttcctattgctgatgtcacatcgtgtgctggggtcgggtctggttccaggaaagatgtcctgccatgattaaagctgcactgggctggaacagcacgagttatctggatatctccgaggagggtggagctggccccactcataagagacctgtgacccccgatcccaggaggttcaagatgaaaggcgtctcagagaacattctgtccactttgtcaaggagaaaatgggcaccggagaggctgacttgcccctgtcacgctgcccccgtcacgctgctggtgcgggcagggagccctgctgttctgcatgtctgcaccagcaggaaagtgagcaatggtgtgcgtgaatctgcccccaaaatacacaccatgcgaccgctcagcgccaggttctagatgtctgggcacagcagcgggtagagtcctaccctcagggagcagactcctggcggaagccctccccagcattggctaaattggagatgcatgattccatgctcaggggtcccccacttggcctctattatgtttggcttggtcgaaacctccagtttcctgagtggccaactgaaggctgggcacgtcctcctggcattgagcatttgcttcagtgactcctagagaggatcccccatgtgtggatgagggggggactttgcttcccagaagcacaaataaaccatcgtgagcgttttctacgacccactgaggtcccagaagcaggttttccccaggtgctttgtggacccaggatccgccagggctttcccaggatggaggtcacaggtggcagggggacaggagggcccgtgcagccacagctctctctcccgcaccaggttcctgccttcagactcagctgcttcctccgcccagaaacaggccacctctacagctcacaggctcctaactccaaggtctgtggttccggctggactgggagagtgagcatccctgccggatgagagcagaggcccctgaccagcatggaacacccccaaaagccaggtcgtagccagcaaggtgagaagcctgggagccggggctgcctgcccctgctcctgtggggactcctgctgtgccaggacgggcagctcaggagacctctcactccagggcaatctcatgcctccttatcaggagctcttcgggagtcatccccaaggtgcaggatgtacagaggggtccctgcaggtactttaaagccagagaccttggtgcatggccctgtttcagcagaggtgctattgcaaatgcctcaggccagagtgaggctatgatcacagtgaagaaacctctggtggtgctttgccacctgagcccacctgaactttccagaacctcagcagtggagggtagcaccccagaccccgagaccctgagcacaagtgcttgtgcttccatcactgagtccccaggggctgacccggttcaggcacatggcaggtgctcagtaaatgctgagtgatgctgctgctgctgatgatgataattagagtagtgacggacggtggctgaaggcttacgaatgcccagcactgggtgaagcactgaaagtacattatttcatttaatcttcaatgcgctaaactggcattcttgatgcaaggaaagaaactcagagtggggaagttacttgcccaagcacacacatccaggatgtagcagacctgggatctgaacccaggcctgtttgatcctggaaccacctgctgctacctgacaggtatggactgctttccaatccggagtaagagggtgtgccctagagacccaggggaggaaggaggggtgggcagcaggacaacgctctctccttcccccaagccccccaggctcctgctgagccagttgtccaggcttcctgagttcattctaacctagtgaccaaccagggtttcctgagaccctgatatgcacccacctctgtgcttgacactgtccttcaaggtgcagaggacaccatagcctctgtaggggctgactcaggacctcccctgccccaatggggagaggtagtggtgtgctggtaacattaacaactggctccgtggggaaaagactgcttgtggcgtttgccaatttccctggtgtaaatactcccaccattgctggttctaaactaccagcctgaaatctctgaaggtgcagctgggaagagatacttacagtccagagcttatatgacaccccagcccatgccagggaggggaggaatgggcggacctgccccagtcgggctccaattcactctccttgccccagcaagaggtctagggaggcccaggaatgggggctggtgagcaaatgggagctctgcaggaggagggcaggggctgccctgcggggaccgggaggaggctgggcagcgctgcttgctggggaaaggctcaggaggtgcccaggcctggagcaggaatgcacctgagtgacttgctcccaccccatccaacccattctgtcccctgacagcaggtttaatatcttttattaattagggctgtcggacgccccgccacactgcatattacttcattcagggaccattaggtctccatgttccacagccaccggctctcaggtccccttcccccccgacttctccacgaagacttcctggaaggcccagggcagatcaagagcctgcccccgcccctcagacctagaggggcttcagggatcatccaggcagagccacactgtgggtgagcagggctccgaggcccacagtcacttcgcaagccaacaacccgccaccaagtcgcatgctctgccgcctgctgttggcagtggagggcgggcacaggctgggccgctgtggtccctgccaccgccctctgccaggagcgtggatgtccccaccctctttctctcctttgctcaggtccacagcttctcatttccccctagggcctcagggctctcccacagtggcgtgagggcaggcggtccagcagggaggcgctgagtgggccatggggcagacctccctgcaaactccaggcctcggcatgcagcctgctctccaggccccggtggggacaagcctgggtctcacagagcccgataccgagcagtcttctgacacagtccctggaacgagtggagtgccctgtccttcagcccgggcttggtgcgggatggggcctgccatgctctaagctctggcctccctgcctggaggcgggacctggcccaagcctcaaagccgaagcacaaattcctcatcagtgaagatccagagccgccgtggtgctaggacacggtgcgcgggaatcagccccgcacctgcaaggcagcgtgctctgcgtgccctgcgtgtgccccatgtgtactgtgtgccccgtgtgtgagcatgtgtgccccatgtgtgctgtgcccccatgtacttgtgtgtaccgtgagccatgtgctgcgtgtcccgtgtgtgctgtgtgccccgtgtgtgcacatgtgcgccccgtgtgtgctgtgtgacccgtgtgcttgtgtgtaccgtgtgtgagccatgtgctgcgtgtgctgtatgctgtgtgctccgtgtgttctgtgcactgtgtgtgccctgcgtgtactgtgtgctctgtgcccatgtgtgctccgctcagtctccatgtgccctccgtgtgtattccatgtgccctccgtgtgctgtgctctgtgcacgctgggaacagcgctagagcgtctgtgcttctggacaggaaaacaagcccctcgtctaccttcaccgtcttccagctgaacgttggtagcacctccacccacagacgcggctgcaaaccccacggcgtgagcccacctgacgcagcacccaccaccacccgcaggagcctcaggccttcctgttaagcgtcgccactccgctatctgctgaccttcacgctcactccaactccaaacctgggcctggtctctcacacgttaggaagccacggatcatgttttcatgcacgggtattttcttttggtaactgtatctcaatacaattggtttccttcataataatctgttttattttatgcatttaagaccattattggaagaaggggtcagatattgaggggttcaaggcacaagacctggtagaaaccactggcccagtgatgccaggggcctccctgctctgatggctgagagatggccccgaatcctgcccggccacctggccagagcccaaccccagccccagaccagactcagtccctccctgctcaggtcagcacagatctcagctgaaaagcgccagacgaggggacagattttcacacgattaagcggtaattctctccaagctcactgcatacaaatcataaataatgtggctccataaatcctcttctcccaccagcttcacctccacctactctgcgtcttgcctggggaaaatcagcaaggagccaggtgtctggctgatggggcttggtcggcaggtgcagagcggggtgctgggaggtgagttcacctcgatggtcaatcagacggacggaaacaccaacagttcccagctcccagggtgagggggcttgaggctgctggccagctggggctgaggtcagactcaggcacagagcccaggaggggtctctgcagcgggtagactggggtggggtggggtggggtggggggcagagggcgtacgtagaagagcactgcacttagggtaagcaaaggagctgagcgacgcgggccaatcactgccccggatgagcagcggcctacagccctattccatgcacgtccctgccgtggtctgaggctgtagctctgagtgtgcacgtgtgtgtactcacgcaggtgcaggcgccacgggggatcagcacccggcactgggcggctcccctcggagccaacaggaaacagcgtacattgctggtctgacgggtgagattggcaggagtgccagagctgctgggggcagagtcgggggtgaggacagagggcctgggtgcagggtgtcgcggtcctctctccccctgctctgccctcaagccgcaggcatccgcctgactcgcccttgagcggcctggcttccagctgctgctcactggccctcccctggggctgaggagaacctcgagagcagcaacactggaggacagggagggggtgcaggcgacatgaggaaagccgcaaggattgggaagagagcacccaactcctctgagaggtaagggaggcgcttaggaaaagcaaagcccttcccctgggagcaggaaccctcttctccaccctggacggggcgtgcgggcccgtgggaggctccaggtcctgaggatgatccccttgccctcatcgtggcccctataaccaggctgctctccatttcacacacgagcaaagtggcctgagccacacaggtagggggagctgccaaggctgggtgggcctcaaaccccagcgtgggggtgaccaaaggcctccttcccatccaaggagaccttctgcctccagggaggagggggagctcatggtggcctcctgcccctgcccacaggagcagggtggggagcaagggttctgagatcccggtaagttaccaaggcaggggccagtgggagaagacagaggaggctgcaggggaaaccagaggagcgggtccctgaggaggcctgggcccagccttgtccatccatggtcactaccagctcctagcagagcttcactgcagctctcatgcagctcccatctcaccttgtaccttcccactcactcagctgagatctgtttgctgagcacctactaggtttgctgagcacctactagccatctctgggacaccatggtgaaaaacaccaccccatgtggtgtcatggacaggctttgtgcagagcttctctgctgtgactcaggtcttccctcctctaatcctcctctacatccttgaggtgtccaaatacctcctctgggaagccttccaggctacccctacccagctgtgatctccactgtactcagttcctcctccatccttgctcaagtcctgctgagatgctgctgtgaatttatataagcaggtgagtacacgcagcatccgtggtacacacagcatttggcctacacctgagggtggaccaggagacaccaggttcctactcagtgggatggcaagaacatcatccaggccaaagctccctcccagggccttgtgaggacaacgcaacaggtcagctgtcaagtgacccaccagaggagaagcgctggctgtgaatatcggagcagcccctgggcctctctcccccagggttccagggccgcttgctctgccagctacagaggcatcctcgtttctgttttctgcatattcattaaggaatattagcattattaatggcccatggtcttcatttagcaaatggaacaggatattaagcacagtgcccaggacatgaggtgggcaggagggggtggagacggcgggaaggcaggaccccacccttgcactctgcacccagcagcctcaggtctgggacgttcccctgtccctcccacggtgccctggggcttccagcagccacctcctagttactgtgagctccaagaaggcggcttcaaatgaacatttgcaaaatgtaattaggaaggtaaatttcctggcaacgaagattacataatgcgtcccacagccaaacacccacctggtggaatgtggttggaaaactggatgtattcatcacttgggatcagtcccctgatgatcccttctttaatgggggtgcttgggagttggtggtccgggcagtggctctgggagggagactctgtgggtacagaacccctgggtgctcacgcctggtcggtcacatgtggctgcgcacagcaggtgcacacagctctgcagccttgcagctgggacacagtgaggtctgtgttgcatggtgagctttgagactctgctcctcaaagtctggactgcggaccctgtcatctgctagaaatgcagattcctgggctgcaccctgacctgcagcctcagaatcacaaaccacagctgtcccagggagggggtcctgaagccagttggcaccctgaccgtgtcagagacaccatgcaggggcacagttccccctgggggaagaggcagttcccccctgcgcctgggcccaaaaggacgccactcggaacatcagggacagcagccaccggtggacactggcattcccaccagtggtgctgaaacagctggtgggcctggaagaggggtctggaggaagagcacggcggggctggcttctgagtccatgggaaaggccacctgggcaccctcagtcacagcagagattgaggagggggcagagacttggtgagggagggggactctgagtgccgtcctctgagaatcacagtgagtgggaccccatctgatcccacagatggtgaggttgaggacactcagcacacccaggatgaggatacgcggtcacgaggtgaggggcaccacctggtctagaaccctggcccagggggcagcaggtgctctctgcttcacctgtctgtacctctgagcacctgcccagtccactgcccggccacagccagggagactgagtcagcgccgcaggccgtcctggggctgtgtttcaactgtaaaatgggacaggcaagggaaggcggtggggtcctggggaggtgagatgggtggcggtggggtccctggggaaggagccaggccaccttaagtgctgtcctctcataaggaaaaccttgctgccccagccattagcctctcctccagcaggacacacctgccctgagccataccccacctttggagggggttgctctgggctggacacagggatgctccctgggaggcctgagccccttacaggatgcccccttcccaagagcaaaagcagggcttccaacaggggggcatctgagcaaaggcctgggctgcccatgactggcccgaccttccttccaggtgctccccagcgcagtgggggcatcgggggagggattccctgtggcatgtcccatcccacccccatacaggatctctgtgggaccattccttgccaacctttccccaaaggaccagaaactgtcctcacccacgtccctaaaatccacaagcggcctggcatcccagggctccctgccccctctgctgtggctaagacagcagccaaggactcagagatagatgcttcaggctgggggacacacgaggtcacagagtccctccctaagacgccagccagggctgcgctatgagctgctgagagctgagagcttgtggattccacagctcctcggccacttatgctgggtggggtcacagttcttggcatcaaacctgagtcccccggctgcagtctgaacctacttcctctggcactgttctgttcctagctaggcggaggcctgggtctccctcctgtacatctggacgggtgaagactgagctccctggcatcccgtgggctgcctgtttctgtttcccttctccacacgtgccgacctcagagacgtgacagcaccttcgccctggagaatctgttgtgtccgtcacgctctccctggctcagccctgacagcccccgcagtacgcgtgcaccccacactgccttcatccactgcccagcccacgcctgggcaaggcccaccccttccctatgacccctcccagccagaggaagtgccatgggagcggccagttgcacccctatgtaaggtggtggagcctggactgggagatgcactcaggaactgcttaggataagcacgctcgtgcagaccgtggcaggagcgtggggaggaaggaggacgtgcctggcccaggagcggaggggaccccatgctgtgaagaagcaccccccaccggccccaggctaccagacctctcactcagggtgggacaacctgcaccaaatgggtccatcctgtgctgctggccactcaactttccaggcactggggcccctgggtctctcgcccaagctctgttggttggctcagcctggcgtagcactgccagaagatggggaaggtgctgggaagcaccgggaacctgctgatcctcacccggaaccgagctctcagccagggtccccgacctgatgtctcagtcctctcaaatgcctgccccagggcaggcggcagtgccaggccagctctcatctgagcctgctctgctcccatcaatcagtagcaagctcctcctggcctgtgacagccacttcctaggagatagtcaccacctggcaggggccacccctctcacagtcttaagccagagtggacgattcacactcgctctaagaaggaggctccatcccaggggcgtggggacagcttgtatggtcctgggattctgcacattcagccacacgcctctgaccttcacaaccctggcatcccccaggactcccagaggtccaggccctcctccggctcgagatcttcccttcaccagaggcacccctgtttgggttctgaaccccagcggggtagcccctggatgcatcctcacagagacacacacacgtgctcacatgcatggactcacacacgcagcctctgtgcacacacgcaggcctcgtggacatgtgctcacacagaccctcttcatgcacacacacacacacacacagccctgttcatgcacactcacaagacatgcagtccctgtacacgtgtacacacacacacattcccagtgcattctcacacaagcacccctggatgacaggagcaccctccaacccccaggccattgtgaaattatcaaatatcctcaggcagggggcggggcaaaatcaccccctgttgagaatcactgacccagacacgccttacccgacccctccacacacacgcgcctgcagtgatcgtgcacgcagcagtgcacctgcacacctacacacatttcccaccccccagtccacctgcctggacttgggcttgccctccactgcctgccccccggggcctgagcgcctcctttcctcccagccaagctgctggcgcctggcctggcccgggcacgcggggagggtgtcgggggaggaggcggatggcttcttttcccgttaggcgcctggctcatggaagaggcgagtgtggatctaatcttcagctgattaaatgtccctcattaatgagtttctttaattaatgaagtttttgggtctgctccacttgctttattccagccacactctgccttctcagcacaaagcggggccatttcctcccgggtaattgagggagccgcggcccgttcctgccgacgctgcactttgctgattgcgcctgtcaactcggggctgacaactccatttttaaacatcttcttctctagaagccatgtgcacatgtgtgcttgcacaggcggaggcacatcccaggcagcccgcccccgccaagcactgtctccgtcacacgccaggcacacacacgcccactcacgcggacaaggcacgctcgtgggcaggtctgatctgcagctgggagcctctccaggcacccagaggggcgtgtgtcaccgagcctgcgaggcacactcccaccgcaggagcaacctgtacatgcctgcacactcactgcacacatccgtgtgcaacacgcacactcagaccgtgcatgcctctacatacctgtattccccatgtgcatacacacagtacacactcgcacactgtgtggactcacccgagcacgctcgtgtgtaccatgtcacacgcaggtgtgaacacccgcacgcacacactccacacatacacagtgcacactctcatactgtgaacactcactccacactctcacactgtgaacactcactcccaagctcatgcacatacacaccatgtcacagtcatgtccaggtaatacgtacagcccacactgcatccacacgcatatacactgtgcatgctcactcctgagcacacacaaccaaaacacacattacacctgtatggtgatgcaacccctcacccacacacacatagcacgtgttcacacctcctcacccacacacgcacatacacagcacatgcattcacaccctcacccatacacatggacacagcacatgcgttcacaccccctcacccacacacgcatgcacacagcacgtgttcacaccaccatccacaaacatgcacacagcacatgccttcacgcccccttacccacacacatgcgttcacaccccctcacccacacacatgcacacagcacatgcattcacgccccctctcacccacacacgcaggcatacagcaatgcattcacaccctcacccgcacacgcacacagcacatgcattcacacccccctcagccccacacatgcacacagcacatgcgttcacaccccctcacacacatgcacacagcacatgcgttcatgccctcacccacacacgcacgcacacagcacgtgttcacacccctcacccacacacacatgcacacaagcacatgttcacacccactctcacccacacacgcacagcacatgcgttcacggtcctgccttggcatgctcacacctgggctcacacccatgtccacacacattccagttcacacactcacctaaggcaccctccccacaaacacagggccccccccaccccgacacagggagaccacagatacacaggcatcaggcagggctgtgcccaccccagaggaggaagagcttgctatggatgcctgcatgccaggtgactatgtctccaggtccacctgtcatccagatgacctgcccagccgcatcttggccctgctggctgcacttcctgctgtgactgggtgccagctctgggctccagggcctggaaggacgatttacaccttctcattggctcgtgaagagctctctgaattaaaagcattcatcttctcctgctgaccgggatgtgggctccttccccgtgaggctggccggaactgggcaggcagggtcacagctccagagccagggaggaggatgcactgccggccagactctcctgtgggtgggcacgtggctgtgatgcagtgggggaccaatgggacaattctttcctaccaggatctgcccaccaccaaccgcgaaaaaggagatccttcccaaaggcagaaatgggcccttctgccgctagggatcagccaggagtggctgtgcccagggcaggatgagcatctctgcactgacgatgccggaggggcagaaccaccgtgtgtgcccggggaggacgtcttgctgacttcatcccagccagacgacgtgggtgtcactatccccatgttactgatgggaaaactgacgccgagagaagccaaataagtctcaggctttccctgcaggtaaaaggggcagggccaggcctggtgtccagctctgtctcactcccaggcccatctctcctggtcccgcggccctgccaggccaccccgccctgtggcttccccaagagggttctggcatctccatgggtagctctcccgcccagcaatgacagcctcgcatgtcattgaccagactcttcctgcgcagcccttggcagagtcttcaccatacctgaggggaatgtgctgtgatctccattgtacaggtgaggaaactgaggctgcgagagcttagtggctatgggcaagtcacgcagctcaagtataacagctcagctcatctctgagcccagggccatttccatctctccactctgagccccatttctgtatctccagccctggccctggagggtgaaccctgtatgatgccacacccagcctctgagctgagatgccactgcctcctgggcaccaatcacacacctgtctccaggtgcatgtgtgggccagacacagcgtgtgccaagcacctgctgcaggctggcaccggcacccacattagctgtaaagctcacgatggcccaggcggtgacagtccctggttttgcagacagggaaactgaggctcaaagagagagaaggacaacctacagtcccacagctcggaagcacagcatgacagaccaacccaggcgtgtgccacagagctttagtctcctagcatgttctagaaaagtgctccatggccaaacttcttggggaaaatgccaccatgctgtctagaaaaggcccggagaagttccgcagtggagagacaggtttaactgtgctgggcatgccatccatccctcacacttctccacccggaattcttttttttgccaaagacctatcagaagtagagatatttgggaaacggagccagatgccatgctgagggctggggttggtcccttgaaaggacacctggctgtgctcacagaggtcctctcctaccaatgctgaagacccttgctgggtgacagaggcagcccgggtggcttcgcagggatggtcctgggatttcctgagcactctctggggacaaagctctatacttggagagtgcaggggaagcccagggcccagcagggtggcagctgcctggtaaacggggatgcaccgtggctcacgcggctgtcgatacaggcagaacggaggcctgagagctcctggactgatgagcactgtggctggggacagaattgggaggggtcaaaagactggtctttctgcaataagcgagagggctgaacctaagattagtgtgattggactcaggagctggggttggggcaggaatgcttatgagcaggacactgttgggggccagccaggagccccctttgctgctgggagttacccagagagcagggaaggctacagagttcacacaggcagaaggcagaggccctgcctagggctccgggagggtctcttctgggcatctgattctgaaatctcagttctatcacaagaagccagtgttaaatttctcttcttatagtggctcagagggggtcagcatggggcctgaggttacacagcacatcagcaggggagggtcaggtggttggggtggggctgggtctcctgatgtccaaacacttacagaaagccacagccccttggcaatgtgcctgggtcgggcaggctagagcttgagtcctgagaagttgggggtccctcggtaagtccttcacctccctgggggtcctgtttcctcatctgtaaagcaggcataagacagcctccctgggcaggctgtgtgaggactaaagctgttaacacaggtgagcggacgacacagtgccccccggtcgcaagcaaaacagacagtgatgccgaaagtgagcgttatctataagaaccctgctgcctgggcaccccaagggagctctggagagccagcctggcctcccctacctgacctcacaggaagaaagggacgcacacaggtaggaaagcaaagaaaccctgagaaagaggaggagacggggcggggcccaggacgggatccttgcccgctgcctctgagtttgtgggaagggagggaaaaggttggtgctgctatccttttacgatgctttgaaacaccgtctggatgaagggaaattaaatatcgcagcttttaactggagccacaccgaaaacacaaccttgcagtaaataaaaagacgatttaccaccgtgacactttcatttcacaaaactccctgtgtgccttgtctgtaattattccctcccggtccccggcctctggcccgactgtattacctgcctctggggatggggaggtggctgcggagcctccaggggtgggagcagccccgttggagaggcaggaggggtctgaacatggttcattatgattgagattaaactgaaaaatcaatttttaattgaatgtattcttcaaacagaccctgttgcccacggctgagcactaatggaatttccatcctaagccgccccttctccttgacgagccctccccagcctgctgaccccagcaggactcaccaggccagcagatctgcccctactggggctgcaacgctgcaactaaactccgccagcggggcacggtggcgggaggccactcgtgggtgtgtggaggtggggaggggctggatggtggagagtctgtcttctccacgtagactggctggccagctggggggtgccgggggtgcacctgggctcctctgaacaggccgagggctgctgcttcttgacccagtctggggctcttacgaagttgttgaaagatgggtctgggcttctaggcacaggggcagggacacagcccccaaggtcctctggttcccaagagacttttctaccaagagccatgttcaaggatggggggagaaccaggcccctgggagtaatgccccccataaccctgaagaccacggcctcccacccatgcacgtggccctgcctggcatcccactgagtccaggtcccaggactagaagacgaagagggaggcccaggacagggacatcctggtgcacggtgggctgctgtgtgaaggatgctggtccctgcacatctgcttcccatctgtaaaggggactcacagcaggctgcaagggctgggctaacagtaagaagggtgggaccacctgcctgccataccttggaccccacaagaaggggggtccctgtgtctgtgttttgggcagccttgcatctgaccgtggcgactagcactgaccggatcttggctgtgccagctcgcccgagtccaccccgttctctgcccaccctgcctctgtccttacaggccccctggagagttccccaagcctgttcctgggggacctggatattctggggacagttctgtggatggtgctgtccttgttggtggagcggggggtgggggggggttctataaatccatctcaggcatttctccttctccaagccagctccacctctgaccctcttttcctccactccctgctgcccccacagctcagaagccaacccacccacagcgtgggggtctcctcccaggctcgccactaccctgtgcagagcagttccttgatgaggctgggccttggccaccagaatcggggttctccccaccagggacacctctgctctggccacaggtgacccccttcgctcggcaccaacgccacgtgcaggagctccctagggacaggaacggggtaggggaccgtcgtcctccagcacaggcccccacacctggaagccactctgcatctgaggctgggcatgttttgggttggaaggtgggtggtgccctcggagcccctcctgcaggaagcactgactcatgaagaccccctccattttcagtcggtgaggacccccgacctgcagtgcctgggctcaagccaggacaccccagtggagggtgctcttcacggccacccctgttcctatttaactgcaggccaggacggacacccccatccttccactgaagggtggccacgaagggggacagacctgcttggccggtgcctggatggtaacaggcccccgtgcccagctctgcccgtgacaccctccagaggaggacacatctaagccacaggcccggcactggcatcgaggggtccagagatctccctgcagaggatgtcgtgtgtgggtggagggatgcgctgacctggccagagaggggggcctgcctccccctgcctctgagccaggccaggccctccaagccgtcctggcatcagtgggtggccaatgggcctgctctcgaggcaggatccgtgaggcctgaagaattgtcccgctctacccccgccccatggctgccttgtttaaaaatgtgccaagattttgcaggacggccacggagggtggggtgggcagagtaggcgggagacgcctaccacagaggcgtcacatgacccccagcttcccaaggtccctccccaagcctcctagctgcctcctgcaggcctcactcagaagctctttcctggtgtggggcaggtccaagtctagatgtttctagaagctcaagcatgctctgcgccccactgctggggcctgggtgagaggagttggtgggtggagggggcagggctcatgccgcagacctgaagccaagcccagggttgagccacaggaggaggaagaagcacccctctcccggccctgggaccacggttccaatcctgcctatgtccccgaacgccgagtgcctcctgaaggccaatgaacctctctgggtttctgtttcctagtcctaaactgaggactaggtgccccccactcgggcacaggaaggcagagctcaggtgccaaagaccagcctgaagtgtagatgtgtcagagctgagggcccgaggcaaacgccctcccttcacagatgtctcctggcccacaaaaggggcagacgggccgctgcctacccacctccgagctgtcaccaggttccgagtccaaaggagacgagcgcacctgtgctcccacacgctggttcccacctgagccagggaaggagaatccacaatgatgcctcgaggctctcagcagggactggcactgaatcgcagcaaggtgggggcgggacagggtgtgcggggtccttagtcgctgcctgtcctaggagatcaggggaaactgagaaactgcccagaaaaacagctcaggaagcccagagcccgagtttgggcacagattctgtcccatcatcgagctcagccaggacccccaacacaggagcctgcgcacgtcctatccgagtgtgcacctgcgtctcctggggtcttgcagagattctgactcagtggtatgggatgggctgagtgtatttcaaataagttcccgatgtgcgtggcggttctgaaacgtggccgcaccctgaaattgccttggaagctttaaaacatactggtgcctgggtgccctccctggagagggtctgaggccactggcctggggcgaagtctggccacagggactttaaaggctcctgtggtgattccaatgtgcaaccgagtttgggaagcacctgctctccgtgttctccggagccagcccacaggccagcccagtcggctctgagagggggccccgccccaccgccctggccttccttctgggggcgcagaggcctgctgagcactggccccgcatgtggtggcagcagggaggaaatggggcattcgccgctctgtggttgtgttttttctgccaccaccacaggcaaggcgttcggcaaagtgagtgcatagttcccactcagcacctggacccactgacacgtggatccatgcggcccacacgggggctctcagccgggcgacggtgccctgcaggggacatttgatgactgctggggacagggtaggtcagcgtctccaacctttttggtaccagggactggtttcatggaagacaatttttccaaaggccgccgggggcaggggggtggttggggagggatggttttggaatgaaactgttccacttcagatcatcaggcattagattctcataaagagcatgcaacctggatcccttgcacgtgcagttcacacgtgaactgtgcccctttgagaatctaatgccgctgctgatctgacaggaggtggagctcaggtggtcacggcagcgatgaagagcggatatgaatacagacgaagcttcactcctctgcccgctgctcacctcctgctgtgcgccccagttcccaccaagccatggaggggttgaagacccctgacgtaggttgtcacaacgtggggtgtccctagcatcgaatgcagggaggccagagatgctgctccacctcctacagacgcccatcagagtctgacccagcctggcagtagtgccctgggccaaatgacaggagggagagcttccccaggggccggcaggcccccgtttcaccactgcattagaccgagtctgcaagagggtacgtgactccatcctaaatgggtgttgcttggacttgaactcaagacctgggtttagtcttagccctgttctttccctctctgaattgtcaggttcaatgttaagggcctggaagaaccctacatgccatcctggttccaggcaaagccagtcggttcccaggtgtgtgcaaagcagccagacaagccttgtgcctcactggggagcagctgaggggctggtctgtgtgtgaccagctgccatctgcgagtccagccccacctggctctggagcagagctggtgcctgcccagggcccagaaaagcttctccatgggggcctgggcctgcagcctgctggtcacgtgggtctgctgctgggaggtcctgcagaagctggggaagatggtgggtctcctctctgcaggctcaacctcaccatgaggagggggcagaggcctgaggagggcgggtgcccctgctgtgagcccctgggcagggtgtctggcagctccttggctgccccctttggctttagcaaaacatgatcaaaacgggccccctgcctgcctcctggacacacccaggggtgagatcctttactttggatcttacagggaacaggggacaaaataagaaactgcaccagcctccgggtgtcccggggtcagcccccggtgccaggttcccagcctgctgtgctgctgtctggacaccagagccaggaccctccaattccaaggctgctcccttgccctcccgtccgtgtcgtcctcagagatggcacggcccaagtcaggaggacactgtggtcacaggaggcgctggccatgtctggccttctggaggaggcaggaaatccattcagtgcccacctctgcaggtggccgggaggacagcttcagttcaccagccctacgcagcccattttacagaagcagaaacccagatgtagagaagataattaactagggaacatcagagttggggtttgagcccaaagcctggaagaggctgtaaaggcagtgaggccgccagccttcccccaacccctccggagcctggcccatgctgtgcgccagaagaggcctggggagttccctgctgccctgagaggcaggccctggtccagagatcgggaggatctcattggggagggggggggctcaccttctggtaagaggatcctgggggccatggctgtcccctgcccttggcaaagcccaaagcaggtagttggcaagaccccaaaaggcagagcacgtggagcccaatcagccttgcacacccctggttctgggctggccaagggccttgtccgccacccacaagtgtgtccaggcaggctctgcgcccctggtgcccagtacctggccagggctgccggtgggcgacgaggcagtagctggtgcaagctttgccaagcgccttcgatccagcctctctctcatgctaatgactgtcaacatgaaacagaggctgtgaaggggaagaaaattactccctgaaaaggaattgactgatccccatcatttctcaaggaatcactgacctgtgaatatttcattacccaaaatgctgcaccatccatccagagccgccgctgccgtggggccccggggggagggcggatgtacagggccaggctctggcctgtgaccaagatttcctcaccgtgggaccccagggtgcgtgcggccctaaagacccagagacaggtgtctggcagacaggaacacggtagcctctctaggttttgggagcggtcatggctaacactccttgcagctgtgttctgtgcctggagtctccattctggttggaggactggggtcccgtttcccacccacagtcccttctccagcctcccaaggtcccttcccaagcctctcggctgcctcctgcaggcctcactcagaaactctttcctggcttggggcgggtccaagtctagatgtttctagaagctcaaacatgccctgtgccccactgctggggcctgggtgacagaagttggggggtggaaggggcagggctcatgccacagcctgaagccaaacccaggtttgagccacaggaggagggagaagcaccccacacccccccagaccatggttccaatcctgcctctgtccccggccactgagtgcctcccgaaggccactgaacttctctgggtatccgcttcctagtcttcaactgaggctaacagtagttggggccaccttacaggttgttgagaataaactaagaccaagatctaatctcagtgcccgacatgaggcagttgcttcctggaagtgatgagagttgggcgactctatcccagaagcacaggccacagagtctgaggacgcaggggagggaggccgaccccgccggggctccctgcagcctccgagggcctctgcgggcctggctggggtaggctaaggccaaagtccccagaggatgggaaaggctgagaccaccctcgctggcactgatcaggtcctgagtttgtaaggtcatgggggatggagggggacagcctggggctttctccaggaacttcaaggggctggaataattcattcaagaaacgctaaccataaaaccctcatgctgttctgggcttggactgggtgggattcaaacactcagcctgcagctcccaccactgacgaacagcgcactctaaagcttaagaagcacaaggagatcctccagggcatggaggctcccgcagcacccaggctgggacccccgctgcctgccaggaaaatgcgacgtctgtgctattattgccggggttacaccagggatggtgtttccaaattagcaaaggcctgggaaggtggcagggcatccatctggggcttagtagagcgtgggaggcagcatctcgggacccctccctggcccggtgcagccacggggagcccagatgcaggcagtggggggagtgggggcacgggggaggacaaaggggggcttggctcaggcccagccccggcccctcctggtggctctccccactcgttggattggaacacgggcattgctgtcctgggggaggagcagggctggacacgagagtggacctggcctcagtgagaaggactttggtgggctgtggggaggagcttcaggctgtgaagtgggtggggcagtgggaagtgtgcctgggggggtccgtggacgattcctccttcgggactgcttgaccactgccttccccgccagctggaccgtccccacacactgcagaaggttgggggtggcctaggggctcatgcccgcccgctcaggccttctctcactttgtcggacccaagaccctgggatgtcgagtggggtcagtaaacggacctgcaggtcctgggaggacagggcagggcggctgctgggcatcgccatgagctgagcttccactgagcatctctgagtgccagggtgaggggacagagatggctgccagcctcctcctctggggcctggagacaggagggggacaggtgttataataagcagtgacagtggctgcgctgaggactcaggctaagtgccagggtggggatggggatgggggctgagggtggggatggggatgggggtgggggtgggggatggggatgggggttgagggtggggggtgggggtgggggatggggatgggggttgagggtgggggtttggggtggatctagttggaggcagacaaggagggactctcaggtatccacaggggaggggcaaccaggagctgcccttgaggtcaggacaagagggtggtgggcagcggtgggcggcagctgtgggccacgacctagagcagcagccacgtcccaggagactgaggccctcaaggcacaaagcctcgtggggggtcctggctggggcccaggccactctgcttgggtaggacgctctgggtcaaggggcagagtggctgctgtgggcctgggacacgcagacagtagaggcctggccgttctctgggctctgcaggcggccaaccccctaactcagctccatccgcaacccccataccctgttccccagcccaggaggttccttcagtgcctcaacctcaccctggtcccgcctgcccatcactcaagataggaggcagctgaactgccggacactctacaggtggccgcgctggctcaacttctttgagaaccaggggagacaatgggaggtgcagggccaccagagctgtcactgaagtaggggatacctgaccacctctgggggcaaggccaggcctgccaggggcaggggcaacagattcacctcccatctcctcctttccccagcaaccccacacctgccccacattcttagccagagaagaggcaggtagggatgggcacttccgagaaaagaggggggcagggaactgcagaggccacagggtgcctctgactggccatggggcctcaggggggtcacctcagctcgagcctcagtgtccccgtgtgcgcaatgggaggacgagggcttgctcatgcctagcgccgcctgcgagggagcctcagttgggcaacgagcctggcttgctgcctgccacagagggctgggcagtgctggtggccgccccgctgctgtgcggctctcaccagggcaaggccacctccccagtccacgctccgcaagtgctcagcacacacacatccctccaccatgctgggccctggactctcagaaccacaataaatgcagctcttggcgcagattctgggtttgatcctcgcgctgctccccctactcggggcaagcaacaaagccggcatcagaccctgcgtgctgaccaccccctgccctgggagggctgaggggaacacaagagaagaaaaagacacacagtccagggggagaagcgaaatccagtgccggggctgaagggaccctgggtcagctgccccacgggacgcgtggtcccgacggctctgggtccagacacgttcggtgtcacgggaaggaggggaaggggcttcccggcagagagcaaaggcacggggctgggaggggacctgcagggggaggaggggaggcgaggatgggaggggacctgcagggggaggaggggaggtgaggatgggaggggacctgcagggggaggaggggaggcgatgggaggggacctgcagggggaggaggggaggcgatgggaggggacctgcagggggaggaggggaggcgaggatgggaggggacctgcagggggaggaggggaggcaatgggaggggacctgcagggggaggaggggaggcgagggtgggaggggacctgcagggggaggaggggaggcgatgggaggggacctgcagggggaggaggggaggcgatgggaggggacctgcagggggaggaggggaggcgaggatgggaggggacctgcaaggggaggaggggaggcgatgggaggggacctgcagggggaggaggggaggcgagggtgggaggggacctgcagggggaggaggggaggcgatgggaggggacctgcagggggaggaggggaggcgaggatgggaggggacctacagagggaggcgcggatgggaggtgcagggggagctcccacatcccccatccccaaggccccctgtcccgcaggggagaacgctaagaaatggggaagcaggaggggtgatgggaggctgggaggcctcagggctccccccacccaccagtcccaatacctgatggactagagccagtctcaactgggagcctgagactgtgcataagtgggcgagtggggtcccaggagaggggccagggttggggagccccagagggctctgtccctgcagggtctcaagccatgtccaagcccagctgctctctagcacctggggcctggccacccccggggcgagacttcggggcacctcccccagcccatcctcagtgaagctgagaggcggctgcttcgggtcagcaaacgtggacactgccttccagagaaatcaaagcactgtgccagccgaggcccagagagtcataggagcagtgcgggccgcagccgaggcaaggaagcaacctccttaggggggactagggtgggggggtatccctttccagctgggccgggggtcaccccgaacttgggatgagggcactcattctgtgagcttcttcaccccgcttaacgccccacaagcgccctgaaccctctgtgcaagtctgtaagctgcacaggcgagcagagactctgggagctgggagaggtggagggtccccagaaggagacggaaaaggggaaagagagggaaagaacaatgtcacagccagcgagagggccagagcagggcagacacagctgtggggggcaccgaagcagtatccacataacaaaggaggcagggccagaggcgaagacagggccgagaggcagagtggcttgggcacaggtgccagacttgccccatcctcccacaccaggaacacggcgccggcctccgggacttcgccgcattgcccattgctttcttgcgggtgtttacaggctgccagcactcctgtgctgggggtgtttccagcccttctctggtgaggcaggggaggtctggaggtggctgcggtcgggtgggcccgctgtccagataccccgccccaccctactccctaagtgcagggcaggacatctgcccgctggggctgccctatttcctctgtccccgtcctgcccctcaccaactgagcagctcacttttcctgcctcaccctggtccagctgtgtctgcccccgacccttggccctgttctggggtccctcccattttgcagaactgctgacccccagatccttggctgggggtgggtggcggacacagcaggcaacgaccacctgtgatcaccccatttccctgcaccctgtgctggccaagatgtgcagagggtgtggccagggaggtaaacagcacaggccttctagaaggtgctgaaggaacttcatgcctcattgagagaatttccaaattccctctactagaaaattctctccacgagaagcccatttttggggctggtggggtgataacaggtgtgagcccagctaagcctcggtgtcagggctggggacttcagaatgacaggagtggctaaagctgacagggccctgggaaccagggtgggccaggcttcccgtttatcagagcccagagaggctaaagggcttgcccaaggacacacagcactgagaacaccaagctcccagatttcccatccggctttttctttttccttcctcccaatccttacttgctgcacggacattatacacacaggaaaagaaaccaggaaagaatcacgtgtaaccaatcccaccacctgcacctgggcacctgacttcccacctcctcctcccacctttggcaatgggctttctacccggctgggaccatggatgttgatatttggcacctgtggttgcagccctctcctgccacatgcccacacaggcctgagccccggctgcccatggtggtctccagcccccatgatccattccaccctcaagtgacaaccgcagaccctactgtcttgaggggatgggaggggcgggcccagtccggctcccacggcagccagggagatggttaaaacagcacacactggaccgtgcctctctgctgcctgaaacctctaatgatttcccttcactctgaagaaatgtaccctcctgaccccggcccccaaggctctgctggtcccctccctccctccctccctgtccagtcccgccccacctggctggctccagccaccagagtctgtgttcagttcttcgaacacgctaagctccatggcctcagggccctcgtacatgcccttccctgtacccacaatgctgttccctcagtctttccttgcccagctccttctgtttcaaagctgccccttcagagatgtcctccctggccaccctgcctgaagtgggttctgctgttagccctctgtctcggggaccccgcagactgtgagcctgtgaggaccaagacctcatctctctttctctgctgcaccgaggtgctgtcacgatgcccggcacatagcaggtgttcaataaaggagtgagtgcctaagtggacgagtggggaagggtggatggagggaggaagtcgggcgcctgtgctgaagggctcagaacctgactggagaggtctggctgagggcagacagaatgaaggacgctggctggctgcccagccgggcatgagccaggacgagccagtatttggctgggtctcgccctgcccggtccccacgtggccgggagactggcgtgggttcagatcagccgcaccaaagacctcaggccttggagctgctggcccctgccccgttggctggttcctgcttctctgaggaaggggaggctgtgggcaggaggtgccactgaggagtctgggcctcccccaaaccctctactgagcaagtgcgaaccctcccaggcacctgcacaggtgcacatgcacaggtgggcaggacatccccacctccctccctgctcttccacaggccccggggtcctgcgcctcccaggacacctcagccctcgtcaggtggcgctggcagcccagcctcggcgtctgaggaaggggtggcagccgtgccaggcatccaaagggtgggtgggggagggggcagtgggcagccgtgaatggcggcctccctgccacggcacgtgagctcggcccagcggttcccggggcagcagcagctcccgcctaagtactatgttgaagtggccagctagtgccgcgtccctccccgcccggggctctgtgccttggtgaggttttattgtgaacacagagcccacaaggtgggggtgtggctgccagggcgctgctcagaacccgccccacacccccaagccttgacagtacccccagcaatcactcagactcctcaacactttcccctccccgctcctcgggcaaccccaactcaacagtggagctgggcactgcccgctctcgggcaggaagccagtgggcagggaggtccggggcggcaggctcccagctccatcagacggatacctcggagcggagccagcatgaaatattcatgcagtaaatggtgcaattttgtctgcattcagccgacttcatgtatatttcagagtattatgaaatggtaatgctgtacggcagaggtggtgcagcccggagggccacagctgggggcaggggggtctcagggtgaagacgaagtgggtggggagaaggaccctgtcccttaggggcacggagatgagaacgaccaactctctgaccagggtgggcaagagaatggaggtgccagcacctccaagacgggggaggcaaggactggagggtgggtggtgggagtccccaagagtgccacagcctggcaggaggcagcccacccctgcacccccaggttggaggcaccccagacgcactcccctcccgatggtggctgggggtagagctgttcccacccgcacctctcctctctgactgccacggggctcgggtgtcaggccaaagccttggtgccaattcagcatcgctgcctcccaggtgcgtagcagcagggcctctcggggaggccccaagtgcagaacctccctggcccctccaggtgggcatcattcagcggcctcgtccctcggccaggcctagccatcccctggtgcctgagtccaatctggctgttgttctggggactgacacacttgggggtgacggggaaaaggtcttgggaaggaggatgcgcccgcctcatttgctacgctctgaactttctgggggtcttggatgcagagagatctggcatccaagagaggtcacccagagagaaactgtccttcagcctctgctgtccaggactcaggtttgggggttccatggtggccaccccagtcctccattcttcatccacccaggcaccaaccatggcttctctggaccagcctcccggggcctacaccagaggaagagcccctggttgggagggtccccattcccagggacagtgaccccagaggcctggcagccccacacactgcgggggcaggggagaacctcgcctgagctgcttgggctgggaactgggtttccttggctgccctcacccctcttccacgtctccagttgggcaggcctagggtccccatggtcagctagaccagggatacgcacaattcagcctttgggccaaatctggcccgctgcttctctatgtaaataaagttttattggaacctggccacaccccctcactcacatattgtctccggctgtgctcgccctaccgcatcactgaggagttgcagcagaggctgtgtggcccggagagactagcccaggtgctgtctggcctcgtacggactgggctggctggccggcccctgagctggacagcaggacagggtgagcctggcttgctggagtccttggcttctgctgatgggaactggcccttctcaggagtcccgggaggaaacggcatgctggcaggcgcggggactctgtgcccttggctggctgtgtttgccccgctgtggtggctgggtgagaatgaatttcatccctggcaagctacagagccacactgtctggtctgcagcctccctggccagagcagcagcccctgcgctctcctcagccgctgctgtgggccagggaggcggtggaggtggccgaagggcaggggcctctggagggcccccagagactcagagaaacccctccggtgtcctcgtcctgacacctccctgctctctcctttgcgtgtctcactttgggctctgctcttactccccgtctcccaccccaggggcccccactctgtcctcacgctccctctgcttttgccctggcctggcgtccatcagcacccaggcactgtccactctgcagctggccctgtggcctagccaagagcccacagttgtccatcccctctgcggagagcccagctgccgtccatgcaccccttccacagacactgaccacaaagcttctccccgtaaggccccggaatctgatcaggaccctccgagggaacctgccaagaacacagatgcctggcttccccctgggtcaccaaatctagcccacagcgagaactggccggtgccacttactgatgtgcccaagggactcagcgtggtagagtatgaggacccgggggtgaggttgtacaggggccgggtttccctaagtccctaaaagctgagatgccctgggccctgagcacagctcctctccttgtcccaggagagccagctctgccgggggacagaggccagggcatcaacagtccctcccaggcccacgctgtccccaccaccacctcttaaggctggcagtgccatgttccacccagctcggcacatgctggcccagatgaccaaggacaccccactccctggctggccagccccagatgaacaatgagtgctgcttatggtcaccgcacgtctggagacgcagcacaggggaggcgactgcaagctaggatggggctagacggccctggggagctgcctctgctgctgagaacgaccgagctgtatcacccgctccaactcctacgctgaagtcctaacccctagtaccttagaatgtggctgtgcgtggagacgggacctttaaagaggtgattacattacactggggtcattagggtgggccctaatccaacatgactagcatccttacaagaagaggcgattaggacatagacacacacagacagacgaccatgtgaggacacagggcaacgacagccatccacagccaaggaagagaggcctccaacagaaccaaccctgcccacacctggacctcaaactcccagccttcagaactgcgcgaggagaaacgcctgttgtttatgccacctggtctgtggcagaccaatacggctacttactagtcggctggccctgggcaggcttcctatgccctctgtgcctcagtttcctctactgtagaatgggatagcaatgtgcccacctcttgggctgtggtgagccggttaagatgtgaagagcctggagcaggctgagcaggggcactgcaaacctgctcctgttcttacacttccccacgactcagaggccggggacactgggcaccttgcttgcagctctcacgccagcttactcctaaacaccccaaccagagcccctacaaacacagccaaacggagcagaggcaggcagggtctgctcccgacagcccttgctaaggacgcccgaccaaggctggcaaggaaggtggctagggctcagagctcactgttttctgggaggagaaattaaaacataaatgaaaaagggctccggggctgagcagggcatggaggtggccaggacaggagcccagctgcaggtacagccccaatttatgtgatttttagggacctggaaagggacctggctcagcccacgtggcagtcacttctctaacttcctaactgcggccccaggatggctgctgggactcccagagatggactctcacggcttccaggggtgcaaaggaaggacagtgtggagtgtgctgtaagccccaaccgacactgcttgagcacctgctgtatactaagcgctttcatacagtgaaggcgaggctgcaggccatgtccagctcacagacagagacaccaaggccacccaggcaccaaggtgatgcagctaccgaggccacacgagaagcaagagggcatctctgtggcaggtgggtagtgggagttagtgtgagttggggagcggagacccaaagagctgtgctgggtggccagggaggctctgactcaatgcccagcaccaggtgagctgacctgggggtgcccatgtgtccacttatgggagaccaggaggcagaggcaggttgggatgagagtcctgggggtagagctggcccgggcggttcctcctcacagattctatagccggagatggagatggctcaggggcatgcctgcctgcggccctggctctccaagagctctgagaccaatgcccccggcttagcccaagccgcacaggaaagccatcctgtggaccaagtctgggcacacagagagggctggactccacacgcatctgtggcaggctcctggagactcctggaacacccctgcattctcccttcattctcaagcaatattcctttgggaaaatgctcacctggtctcagctgaatccaggaaattgattgccacccactcacacactcagagttcaactggggtggtagggacacatgcacaggaccgtgcccacgcctgggctgcatgcccgcagctgggggacacacacacagagtgacgtgcacccatcacttacacacacacattggtcacacacatgtccacactaaatcatttgctcacaaccactcacacacacactacctccacactcacaccctacagctgctgaggagggtgaggacaggtcgctactcccacctccctcataggatgagctgcaaaacggctcagaggcttcagcgagggtgcatgcgtgtccgccgagtgttccagcgtcccgggacagttctccccagcaccgttgatacagcccccactgccctctgaagtgcagacaaaacggagggcagctctgctcagggcctccctggccccaggaagggccaacaggcagcaagggctgccttccccaggaacgctccgctcgagtagtaagtgactgcctagctccggccccgggggattctcctgagatctgtgagtagatgaagctggggattagcagacatagctccaggccgggaggaaaaatccatgtgtgattcatgatgccctcccagacgtggggcgatgcaggtggcctggagccagggctgacgcctaggaccccaacatttctctgcacccaaggggtggacctgggggccatgcaggcactaaggcaaggcacgagcgtgtgagcgtgcagcagacagcatggcagtgtggtcccacctcaagctgcagggcagagcacgagagacccaacgtggtctctggatggggtctcaattatcctgtacggccaaggcctaagttctaagagctgggcagtcccccgtatgtggggcggtcacaagcctgcagctgtccctcctgctgtatatccatcccgagctcaccctggagcaggcctgggttcccggggcacccccatatcccacctgcccactctcaaacaactcttaggccagaaaactctctgagaagggacagcaggacttgggattcccccattcattcattcattcattcattcatttttttcttaataaacatcttggcgagcgtagtggctcatgcctgtaattccagcacttagggaggccaaggtgagtggatcatttgaggtcaggagttcgagaccagcctggtcaacatggtgaaaccttgtctctactagaaatacaaagattagccaggcatggtgacgcacacctgtaatcccaactacttaggaggctgaggcaggagaatcacttgaacccaggaggcagaggttgcaatgagctgagatcacaccattgtactccagtctcggcaacaagagcgagactccatctcaaaaaaaaaaaaaaaaacaaaaaagtctcgtgggctgggcacagtgctaactgctagcaacacccaggcaaggaagatgtctatctggtttttgcccaccaggaatttggaggttagaaacatagcccctctgcagataatctgtagcaggacagaaaacaaagcctggttatggtggggtcatccagcctgaggcactcaggggaggctccctggaggaggtggcccagctaaagccttgaaggatgcacaagagtgagtgagccaaggaaggggccggcacgagtcaagtcgcagagcccaggggacaggtcaggttggagaagggatgctgagaggccccatgaagcccgtcctctgctgccaatgaacccttcatggaggcctggaagcaccgcatggctccagcacacaccccgatcccatcacttccgtctccgcataccagctggggatgctgctccaggaagtgacctcaccttttaaatacaatgcgtcttcctgcaacttaaccccctcgggggtgtgtggaggcccggaagctggcctgcctgctcttgcagctggtggttgaagtgcccttgctcttccggttatggctcttccgttttttttttgtgtgtgtgtttttttgagacagggtctcactctgtcacccaggctggagtgcagtggcgcgatcttgtttcactgcaacctccgcctcccgggttcaagcgattctcctgcctcagcctcctgagtagatgggactacaggcgcataccatcacacccggctaatttttgtattttcctagagacggggtttcaccatgttggccaggctggtctcaaactcctgacctcttgatccgcctgcctcagcctcccaaaatgctgggattacaggtatgagccaccgtgcctggccacacccacactctgtggggaccagggcctcctgccacaatcaacccacaacagtcgaaggaggctatgaggccccagcgggacttttgggggacagggatgggaggaaattcaggactagacagattacaaaaccgctcacagacttctgcccccagctgcccctgctgagaattgggagccagaaaaaggaggccaaatctcagggtaatgttcatgctccttgtaacctctggtcccattaaactagcagcacaatcccagctttaccttgcagagccagacataatggggcattagaagggaattgaatttccctttaattacaatggcccacagacattgtttaatttgtaatctgggagttaatgtggttttctcctcttgcagtcatggggccgcctgcacacacatgttctcattcacccggacggagcatggggcccaccctgcaaggtgagacgtcggacaaggccgcccccagcccggtgagtggagtgccgcgcccagccctgcctctctcctgcctccagccaggcccaccacacagaggacgtcagtgtggctgtcacatgtcacatggagcacacatgcatggagccatcctaataggcaggcaggagcataatttttcctctaattacatattcagcacttctgagaaaatgagattttagtaattcaattggactgagaagcggggctataataaaatggaatttgtaacaatcgcgcagttaaattagttaaatggagaggaaggagctgtggaaaattgacccctcgatctcctaaggactaatcagacatttgaactgagctgtgctaacaaagccctcgggtgttgtgggtggtgtgggcgggcgggggtctcccgcggcaggtgaaggaggggacggcggagagagcagggctgggagagccgggaggggtagaggacagctcagggcttggggaagtaggtgctggaatggaaaaagccagtggcacggcttctgatcaagcggttctcaaactgcagttttcagaacatcctccagtgccacctggagagggacaaagtcacggaggagaccgaggtctgtgacatgcagctctcgggtgctcctgagcacagacacgccagggctgtctgggggagagagggtgacggcgggaccaaaactgtgcccacctcactgccaagctgaaacagagtggttcaagctgggggagaaaagcaacttctggccagggtgtggccactgctcccccatctcacctgggagcatccggccccaggaccctagccgggtccctctctggccttggccagctccctccttggggccgggcagcacactcggctgaacaccaagtgtcacagaggaggcaaccgctcctgccccgcctggggaaagccgcaggcccggggcctcacggcctcagtgttctgagggtgtcaagaggggaggtgtggaccccaagcctttggagaaactgagagatcccggaaacaagactccagggatgctcttcaggctgtggtggggcagagtggagaggccagggcatccgaatgtccttctgacgctgccccagacccttctggtttgcagagatcctgtcattcaggagaacattcttccccagaaaccctggcaacataaaaagtcagggaagtcccagagctggagggcaggatgggaaccgggaaggttgttgccacctggaccagactggtgctttcctcaccctgcccacccagcactgggtgcagagctgcctgggtggggaaggcctagagggatgccccccacccgcccgcaccccacttgcttccctcctggctgatgcggaagctttgccaacagggtgccccacctccctcaggcacctgggaccgccagatgcagaacgggtctcctgcgttgagctcctccttgcccaggtgctgtgggtgtctctgggccagatggtgtccagacaggcctgctggagcccacccagcccaggcctcctgaactcttatgctgagccatgcaaacaggctggggccaattggagggtggggacccctgccccacagcctgaccatacagcacattctagaatatcagcagaagcagcttcctgctttcctctgcaggcaggcccacctccaccccacagctcagacagaggtgtgggctccaggaatccttctgtaccagggttcggaaaagggtgagatggggaagctcaaggtttgggatgggggagggaaagaatgggccaagaagatcccagagatcccaggcctctgggaggggtgggcatggctgcaccccaggttccccacctggcaggggcggtggcggtagcgcctgggcagaaaagtgcagctgctcttcaggagtccaaggttagggcatagtggggagctgggagaagccaacaggctaaggacttcctgtgggcagcaccgtgctgagctcgtggggtcatcccacttaaccctgaagacccccaagatacaggtgctggactgtccttggctgtgcagtccgcagcttgggtgcaggacaggggctctgcggcctggtgagagacgctcctgggggtgggcggcacttcaccccttcagtcttggggggaggtgttacataattaacaccttgggtgccttggcgcatggccagctgtgccagtgaaaacggtgccactggcccttggtgggaggcccagcgtcaggtgcggccacagcacggcggagcaaaacaaaagtgcacgcattcctcggttcatggaggtgagcccttctcttggtgagggcagtggaggtcccaagtgggaaggccgggggtccaggcaccctcctgggagcctcacccgcgtggtggctgccctgatgccccagaagctggtcttcccatgtgcctgggcagcgggctgggagggccagggggagccaaactgcagaaaatgcagtggccctagcaggcagaactcacccttaacttccctcgcccctcttctccctgcaccagaatcacccaagggacccagcgtttcactcatctttccacccttagtgccgggaagaaaatgaaccctcagaataacatctgctaaggaaagaccagaccacacgctcatctttctagagccaggaggaaggagcctctgacatggcccctgaacaaaagcagccgggccacacctaacaggcagggtgggagggggaggcatggggagcagccgggagggatgagaggcgggagacatgggctggtgtcctctgccctccagcatcttcctgcacagccctctgggctggcttccacctcccaggctgcggtgagccattcaaatatttatccttgtgtcatcttctgaaaggggagagaagagaaagagggagggaggaggaaaaaacccgagtttctcatttgaaagttaattagtctaattaggtctaattaagagcccccaacacaatgcagtgcacaaatgaagtgccggctcctcatttcctttggttctcattttagactgagctgggaaagcctgggaaggagggggtgcctggggaggccgcaggagggcacagcggggtcccatccctctgggggacaggtggcgggggcccctgggcagagctggcaggtgcacatcccgattcctccatgccagccatcccgggaggtgacgggatgaacttttaaatcccattctcagtgctctcctgttttctggctccggagccccctggagaaattctggcttcgccggccggggtccctggctcctttcgcaggtgcctcagacacgatcttcagacctgcacaagggcttggggtctatgtccaggacatgccccacccccaggttctggaagcttccagaagtcaggccaggtcacaggatcattaggggctgagtcctggtttgggggtcccgtgcctacctggatcaccccaaaggagggcagggcagcagcagataccatgagacgccctgagattgtgggcattctgcctgcagcagggctgggagccggtgacacgcggcggggttgctgaggacactgtgagccaaggccctgcagggcacccgcgtgcactggccggggagggatgtgtccacaggccccgggtttacacagagggaaactgaggcccagggagctggagtgagatgttgcacagatctgtacccggcgtgcggcagagttgtgattggaactaggtacaacagagggatacaaacctgggcttggcccacgcccacccctcctgttccccccccgggcaggtaagggcgaaccttggccccagacaaactggaggatgcaactccaagcaaacaccagtgtgggaggggctcctttccctcctgcaccccccagcgcagcctcccgtgggaggggagccttggcaggagctatgctcaggaaaggaggcccgggcagttgtggggagcccgccaggagctgtagccgccccgggctccaactcaggcagccgagactgagccatgcagcaatgggaatggccggaggggatgatgtctgaaccaagatcaaaagacttaagtaggctcagctctcagccacagatgaaggggagtccaagagccacccacggggagctgagatgggggaagggaatgagggggcttcggaagggtcccgagggagggcagagcctcagggaaggtgaaggcccaacaccccagcaccgagatccggaggaggagcccagcccctatgaacatgcacaggtcggaatgtaggcccttgaccctcaccatccacctggccgagggaagcccccaggccactcagagcccatccacccctcctgccagggctggccccagccaggtcagagtgcggatgccaggctgggctcagtgggagaatcgaaacaaagggaagttgccaataaactttttgggtgatgaaaattcaaaaacgggtttctgggatggttgcacaactgtgaattccttaaaagtcaccgaattgcacacctgccaaagagtgaattttacagtatgcaaattacacctcaataaagctgttaaaaataagaaggtgaacagaccagtggccatgcctccgggggcccagagacagcctcaaacaaaggaccatgaggaaatccagagagcccagctctctcaagacccccggcaaggcgggcacgtcacccccacgacagacgcgctcacaagggcaaccttctcagctactctgggccgcagttcttctcttctgtgaaatgggaagatcgatcatatcctggggctgctggaggctcaagtcagagacttccagacagtgccaggcacatggccaagaacaagcccaggtacagtgccaggcacagtgccaggctcggggagtgctaggcccctcttcccttgttctctccccagggtctccatcaggctctggggggccccttcttcccctccctctggggtctctatcaggctctgggggcccctccttctctccctctggggtctctatcaggctctacggtcctactgagcaccctccaaggaggccctggctgatgtcagggctgtgggtccatgggaccttggctctagtggggccgcataatcccccagcagcctcccatgggtcatggagtcctttcctggccatcacaggcttggcggggttgaggactccaatttacagatgagggcactcaagcctgtcttctggtctgtctctctcaccccgggctcactcacagccccggccgcagtctgcctgcccccgcagaggaagcgtgcttggtgggtcccctgcagtcccgccacccgtctagattcctcgctttaaattctccccatcagctgccctggggcctcttcaaccctggccctacctggggtccagggcaccccggagccggagcacggggcctggaggtgcccccgggaccctggaagctgcctctctgggatgctaggtcctctcagagctcatccgggaccctccaggggaagcacagaacctccaaaggctctatggatttccgaggagggggcaggacaaagatgggcctcccccaggtaaaagcccttcccttcacctccaaccacagagtggggggcagtgggggtccccggctggaccccagccccagggctgggtgaggggtgggtaactggggagggtggttggcactttatttacggggtcctgaaacagtggggccggctcagaggctaaggagcccagagggctctgatgccccgaccctcgttcgggaggtccatccctgagggccctgaccccgctgctgcctgacccctgaccggcagggccctaaagaggcaggtgcggcttgccatgggtgggtcccccactgggcagggaacctgcgaccagtgcctccaaagcatacttccaaccctaaattaaaataaatcccaccaccaactcatgaatagcacaattgcatggcacctgcctgagtatgggtttaaattgtgaattgaccaaatggaaatagtcaagataaactacacattttgtgaccttatcttagcaatttctcttcctgatgtcatagatccacagcctaagagaacagaagaggcccgtgcccaagggggttggccccacggccgccctatgtcctgtggccccctgaccctgccagccaggaggtgtcctcacccccactggtccatgaggaaactgaggctctgaggggagaggggtcactgagcaggtgtgggcggcctggcccgcttgtccacatccgctgatgaatgcactgaggtgggacagtgccaccttggacaggccagccgcacggggctgcggcctctctgcgggtggcccggcagacacagagccatggtctcctctgtcagccagtgtgtttgggaacatggcccatttgctggttcatcctcctagctcaccctgtcttcccgctgggcttacatgccgggtgcgccctcgcctggccctgggtcatgaaggcactgcagatgcatgcaggtagggcagagagcccacttggtactcacagtaccagatccgtagcaatgcagccgtggccccagacacacagccgtgatacatgcctgccacccttggaaacaaccagcaccccaaacacgcacactggctctcgccacactgccgctgagtggaggaccttccaaacagccccctggccctgctcagctctcaggaaagagcccagctgcacagggcggatccgtggggactgtgtgaatcccggtgtcatttcctacttgggatttgtaagagggacaaaggcagcactcacagccctgattcagacatgcaggggggtgcccacctctgcttgggcccagggcagtcagcaacccgggtttcactggaggggctgggtttttctttttcacacaccttaggcatcctgaactcagatgctggggtagcggtgaggattccatataggggaagggcagggaacacccctgggctgtgcggtgggcagtccctctcctcctcccctgctccttcacccactgcgggcaggacaggccctcaaactgctcccacaagacccctctaagagccagctaagatcacacaccccacccaggacccaggacccaggaccccgcctgcctccgccagggctgcaagccctcagtgcagagtccacaccctcccaccatgggaccctgcacactgcagccctcgagaaacaggaggcggcaccgagggccccacctggtgtggtcccgtggcatgaggcagccccaaaaggcaaatccacagaggctggcaggaaggccgcacacgggtgggctgggaggctgccagaggctgggtggggagaacgggaggtggctgccactgggcatggtattcttgttaagatggtgaaaatattcaggaactagaagtggcgatggctgcacaacgctgagaatatactgaaaaccacggaaccgtatacttcataagggtaaatgttacgatacgtaaagcccacagatacaaatcattaaaaggaaaggaaatgaagagaggaaagaaggaagaagagaaggaaagaaggaaaagaaggaaggagagaggaagaggagagagttaaaaaaggaggaaaagtgggaggaaagaaggagggaagggcaggaaggagagaaggaaggagaagagggaagggaaggaggaagaaaggaaacggaggaaggaaggaaggatggaaagcaggaaaggaggaggaaggaaggaaggaaggaggaaggagggaaggaaggaagggaggaggaaggaggaaggaaggggaaggaagggcagggtccggaagaggctgccttggctgcagtagggctcaggccagatgttcacggagaacaacaggttaacggtgtccagcttccaggagggccaagtgttcatggctggctggggtaccggctccggtcctgccaaacgggccagaggggagatagaggaaggagttggacctgagagtcccctgccaggggcctgcagcccagcctggagcctgagggagggctccagggccaggggagggaaggtgttttctccatcagggagccacggcctgggggctcttgagggctgggggggcaaggcctggtcagtgcaggctcaagcatcccatccaccacgcgtctgcaccgtcctgaagccagaaaccagctgttctacagggacccctccgtggtgtgtccgttaggcctcccaggtatacctctcccgctaaagcttccccatccacccctctctgtccctactgctgcccctgcccatacccctgttccggccgcccctggtctgtagctttctggcccctccttttctatcccagatgaactttccttacttgtaaatctgatcctcactccctgctcaaagaccttctgtggctccctattgcctactggaaaaagtcaaaatttctcagcctagagccccaaaacactcactccctcgcaccccgggtaccaggtgctccaggaacccccgtgaacccactcaaccctgtctttccacgtaaactgctgcctccgtgtggatggtcctgttcacagatccactgccacaggtccagaccccaaacacagagggcagagccccgctcctgagacacctgcctaggtctccggtggagataagccttattccttttagatctgagctgtccacttcagcagccactggccccatgtggctgtcgagcaattgaggtgggttgtgagtgaaaattatacagtggattttgaagattcagcatgaaaagagaatgccaaatatctcaatcatgtgtatattgattaaatgctgcaatgaaaacagtttggactgggttacacaaacacgtcattagcacgaatttcatctgcttccttttacttttgcagatgcggctgttaggaaacgtaacatcacccgtggcttcaccacgctgccatctgcggacagggctggtgtaggccagagactggccaacgttttctacgaggggccagagagcaaatatttagagctttgctggccatatggtctctgctgcaactgctcatttctgccgtcgccaggcaaaagctaacacagacaacacgtaaacaaatgagcgtggctgtgttccaataaaacttttaaaaaataaaaacagacagtgggacagatttgttccacagacccctgcactagatctctggtttccagacttttgaatcacactaattactaacatttaattactttttttttataaattaaaaaaaaaatagatcttgccactttgcccaggctggtctcaaactcttgggctctagtgatcctcccaactcaacctcccaaagtgctgggattacatgtgtgagctcaaactcttgggctcaagtgatcctcccaactcaacctcccaaagtgctgggatgacgggtgtgagccaccacacccagctgtaatatttaatttaaaaagggtggaggagggggaagatccattagaattaccaacctttggctgggtgcggtggctcacgcctgtgatcccagcacttcaggtggccaaggcaggtggatcacctgaggtcaggagagttcgagaccagcctggccaacatggtgaaatcctgtctgtacgaaaaatataaaaattagccaggggtggtggtgcacgcctgtaatcccagctactcgggaggctgaggcatgagaattgcctgaacccgggaggtggaggttgcagtgagccgacattacaccactgcactccagcctgggcgacagagtgagagtccgtctcaaaaaaaaaaaaaaaaaaaaagagaaaaagaaaaaaacgccaaccttttattttcccaaatgaggacatttaaaaaatgaacagcagatatcactatcacaaaaatgggcatttcaacacaaaaagtaaacatctttatgaaaaccatgactacattattctgattttgcccactttgccacaggtaggtgaaacctttgtcacagacacagcgtgttgttgcctggtgcaggagctgggaggggaccggtctgagtctggtctgaggcctgtggtcatgggagtttctcccaggccaccctgtccacgtccccctggtgctccccatgttctagagcagcgtgactccctgggcctccatctgatggcgattccaagggaggcggcttggggagccggagggtctgcgcttctagctggctctcctcactgcaggaccagagggagtatcagagccctagagttgctgtgtccaacagaaaagaatgttctagatcggccagtacgttaaccaggagacccatatgactatgggtcctggaaacgtggcttgtctcaacagagatattctgtttgtgtaaaatctacacccaatctcaaagacagtacagacacaagaatgttaacgatctctcatagtttatctcatcctgattattctgggggataagatttgagctatgctgggttaaacaaaatgtatgattgaaattcatctcatctgtttcttttcaccttttaaaaatggctaccagacgggtgaggtggctcatgcccgtaattccagcactttgggaggccgaggtgggtggatcacctgaggtcaggagtttgacaccagcctggccaacatggtgaaaccccatctctactaaaaatacaagaaattagccgggtgtggtggcgcacgcctgtaatcccagctacttgggaggctgaggcacgagaatcgcttgaacccaggaggcagaagttgcagtgagccgagattgcaccactgcagtccagcctgggagacagaacgagactgtcaaataaataaataaatacatacatacatacatacgtacatactactagaaaatgtaaacttccctgtgacaagcactgtatttccatttgacagcgttgctttggagcctttcacagagccagccagcctctgctgaattcttctggtgatggggaacttacacctcatgagacagctcatgctaaaggcattaacactggagacgcccttggaggtcgtcttcctactgccatcccaccctctagtcctgctagccctgtgctgcctggtggggagggcctattctctctaaggggcccacctgcagacttttgaagatgatcagctaagatcccagttaaatgcccctgatgcctttagctgatcttcccggtcaaccttccaaaacacacagtggcttggcagtgacggcacggcactggatgcgccagcgggtctaggtggctctgaccccatcccgtccgctcactgggtgatggggcagggggcctgggaggaaaatggtgagctggagccacccctggatctcagactttgctgattttaccccaggccttctcccaccgtgtcttgccatgcagctggagatggcttcattttttacatcatccacctatcggaatggactctccatgggtcattctgagaccctctccccacgctgagtacagagctttgcacacgccacgtgctgaagtggagccctgctgggggtggggggtgggggtgtcagcgacctcttagtcacccttgactccagggtcactggatcttctgtttccttttgcttcccctgaatttgttggtctagttccttgtgaagtcccatccgcttattagctacaccaggagacacagaggaaaacggcgagcgtctcagtcccaaatggggagaacagggcctctccccaggcctggtggtggggaccagggaaacctccagggtgaaaacacctggtagaaggtttcctggggcagggacgaagtgctcactatcacttagctgtcctctgccttgccctatggtcagtcccacacacacaggcacacacacaatgcacactcacatgcactcacatacatgccacatgcacacaatgcattcactcacatgcacacagacacacgcacacaatgcagccacacgtgcacacagacacatgcgcacacacacacatccacaatgtactctcacactcagacacgcacacatgcactcacacacactgacacaatgcatatcacatacgccacatgcacacaatgcagtcacacacgcatactgacacatgtccacaatgcactctcaccgactcacagacacatgcacagtcacacactgatacacaatgcacactcacatgcactcatacattgacacatgcacacaccactcacactgacacacatccacaatgcagtcgcttacatgcactgacacacacccaatgcacacaaccactcacacacaatgcacactcacatgcacttgcacacacacagacacatgcacacaatgcattcacacgcacacatacactgacgcacacacaacacacttgccccacttagcacagggcccggcacagtgaggagcaggtgacgtttgtctaagtgagactgaggcctaggagtaggcgacctgggcacaggagagctgagcgtccccttgcagggtacagccacgaatcccagcaaaatgcaccttcatccacagtggcctctgcctggaacggttcctccttcccctgcttgcaggcctcagctcggggcctcctctgcccctctccgaggcccccgtgccaacccccaggcatgccccagcccctcctgcctcttccttcctcttcctccatacctggcaagtctatctgcctctttagtgacactctatctcccttccccacccacatgataactccgccagggcagcggtgactcatgggggtctgacacgcaggtgggagtacctggcgatggccaaaggacacatggctgaacagcgcttgggcagcatgaggtccctgaccctgagcacctgtcatttcccaactggcatcctcgctctttcacataaggaaactgaggctccagggacagggagctcacgctaggccaccaggctggtcaccagaagggcccaggacagcagactaccccacccatcccattcctctggagtccctgtcataacggcttcagatggacacggacctatgaccactcccaaggctggcatggagtcactctcctgggatctcccggtgtgggcactggccgagggtggggtgactggggtcctttcccgcgggcgtgctgcccactggagtgtgatgaagcagccctcttcctgtctccaggcggtccagggcctggcagacacactgcctagaccacccctctcctgccccgctgccctggctccccagtgctccctggacgagctccccagggtcagatgcttgaagctgactcaccacagctcagaagctgggcacgcccgagttgccggctcttggggtggcgcctctgagggtgattaagaggctgttcagaaagcctggattggtggtgggcagcaggtccgagctgcggggcgcagtagcctctgcagccccaaaagctctctggagagaagatgtaaaaccctgcctcagaggcttagacacagacgccccggctggaagggcaagacggctggtggactccccactctctctgaccacctgggggctcgcatacaccctcacagccagtgccggggagatgtgcttgtcaccctggggaccaatttctgtgactgagttgtgtctgtgaaccccaggaagggcaggacagggtcctttactctggactctaaactcagggcctactgtggtgcttggcccaaacggcagctccaggaggaatttgcggaagggggtcctctggagacggtgacgccccacctctttgccttctcctcttctgtggattccctgagctgtgcagggaccccagggcgagggcatggcccttggatacaaagaccctgcctgccccacagaggtctgggcccagcagagacaagacttgctccattgcccttctgtggctgtcgggcccatctctgttgagctggtaagggacccactgtccacagttcaagctggacctgctggcaccagagcccccagcaccccccaagcagggcccatggcatgagcccagcagctcagccgagtagtcccagccttcctgcccaggcccaagccccccagccccaactgggtctccttccagagccgaactcgctgccccggagggactgtgaaaccaatggccatattccagctgcgctggtgacacaagaagtcggagtcagtccttctggtctcgagtaatgcgatttgcaagatacacacagcccccgacaagccaagtctgcctggtggatgggttggctggagggggtttcccaggggcctagttagagcctgggggatgaggaggggctggaatcttccgggaggaagtagtggtggctctccctgaaggagagaagcagagaaaaaaaaaatgaccgtggcagagagaatagaaattaggcagggagggaagaaaaaggtgaaaagggagaagattaaaagcatggaaaattctaggggccacagctgatcataaaggcagaagaaaaagggttaaggccggttaggaagctccgagacaggtgctccagagaaggaagccaagagaagagacagacggtgacctgtaatctccttcacggaggtcccagctgctgtcccggtctgggtcggaatccactggcctcccctagtccccactatgccccctgggtcccacaccaccaggagctccggacctccctctggacgcctgcccatgggactgtctgtcctggcccaggtgccacatgggcctagcctgggctgagctgggtgccaggggttgcaagcacctccccagagctggcccaaggccaccactggcctcctcctctccccccccgccctctccccagccttggaacctgatattctgctttaagccacctttgggttgtgtccccaggaccagaggacaggagacagaagggcacgtgggctatcttggcctccacctcctccaaggacggcagccgtttgtgcttcccaagttgtgtggctcagcgtctgccctgcaggtctagcgggcagcagacaccccgctgtgccaggctggagaggagaggcgggaggcacattcattgcatggctgcagcgttctcccctgccctctgctaacctcccagcatgccgaatggccgtcagcttacccccctctgcgagcccaacctgctcctctggcccataccggttggagagccagggggcacactggcacacccatgctgcccaccaagcccaggtcctcaggtgggacaggtcgggatgggcattcttcccatgtccatcccagagcctgggtgcaggtggacccgcttcctagaccctccatgggcaggggtcggggagattttactagtagttcctgggaactggtacatgattcaaaccttagtctgctcagccatcaggatgaggttttgcagcctctttaagggacctgaaaaatcctaccaccctcaatcaagcgcagagttagctgctccccattgcctggaccatccctggccccggccctctccagcccctgagaaacacacatttgtccacgttgggaggagccccagtctctggacagagacggcccccagggaagttggaggtccgaggctgctggctgcgcacagcccacatgccccgccgagtctcaacactgagcaacccgccgatcctccaccgagcagcccccatctgtgtccagggccggagctttctcctcggccatcactgccgggctcctacgggctccttccccgccgccacgtccaccagccatgcttatcctgtgtccagccagccagagctccctgctcagagaaactcactcaccccacggaacaagacaccatgtggaggtttccgagacaggacccttccgcttttctgaacccaaaggaatctcctaaacttcgctgggtgtcagggttcaggggagatcaggctaaagacttgcaggaaaagccaagaaagagcttaagcctcaagaagcctccagataatgcatgttttcttttgcacatggccaagaaaaggggttggaaaaggaccagaacttcctgaatcttcgttgttcaggagaaagcgacatggactcgagccccaattctggaatctggctgcctgggctggaatccaggttctgcttctcagcagcttcccgaggtagtacgtgacctaacctcccagtgcctcggtttctccaactgaaaacatgcatgtccacaccctcagcagattccagaacaaacgtcagctgccaaggaatgaaactggggaagaacccacaaatgtaaccgagctacttcagtaaccaaatgacatcagggtaaagaggtctcacctgtacggatgcgtggctcaaagcaaggaccaagtgccatcctttccccccaatcattcccagggagtgagggcgcaggaccgctgcgtgggttcattcagaataaacatcacccgacctcaactacttgtctggttaaattctccagtgaacaggacaatttttcggatgtggctgcagccagcagaccagacctgggcagcaatggatgctgccgcgggtgcacgagctgctgttcagtgccctcctccctccgctggccagtggtgggatactctctagccacccatgctgacccgcgagccagcgtgtctcagacggggttcctggaatcccaccaagtcaacaggggaagcatcaacagcccagggaacagagactaaacgcaaggtgcaaggggtggtgctacgtctgccacagtaattaatcctgattaaaaatgcctgtgattagcagcctcgctaccttagagggaagagagaatgattattaataagaacagtgcctcctaatgaatctcagaacagaccctagaatccccctgcccctcggcggagcctttgggttccacaaccagagggaacgtgctctgccatcaacaactccaagaagcaattgctgggcaccgtgaagccgctcggaaacgccgcatcctccacggaagcttccggtgcctggtgatgtttacctcagcaagggagactatctgtgatttcaccttgattgagcacacacggagagcaaaagcaacggaattcacgacgcgtcccccaggaagaccctgggtcctctcagggccagtccctctcccccggccagccccctcccctccccttacaatacttgaaggcactcacagccctctcccccggagccatttactggcttgcaataggatggaataagattctcttttataggagactgcagtttaataataaagtaattaccgtgacaaaatcccatttttcgagcttggggttttttcctcctatcctctcaaacttggtccactggatcccaggccagggcctcccagagagtcctgctgatggtctagattttcagatgagctccttcttgccctgaaaggtgaccagtatcagccccaaccctcctcactggccatcatgcaccagcaacaaaagcttcagggttcctaggaggggtcagatgttgggggaccacggcacggggctacccttcagggagctaggccggcgcccaagtggggctcctggaggtgggctgagtgggcaggaaagcttcaaagggcatgaagtgagtgtggcccagggtcacccctcatgagctcttaacaaacaccagagcccaatgcacagctggagttctcctggtgtcagatgatccgaaatcatcccgggatggtcggaactcagaaatatcacctccgctgctgggagaggggctgagaagacagagggaccaacaacaagtgcctctaattaatcacagaactgttgtgtctcaggagggacacaccccatccccagcctacctagggtccaacccaaggcagcaggaaaaggctcatgcttcagtagaacggaattccgctgggtgaggttttagttggtaatttccagtgtgaaagactataggcttagaaagcctgtttaaatgctgcatcttaatgtgcctcaaactacgtctcctgtcttgcttgatttcacgtcttttgctcccgctcttgttatcaaatgtgctgttgagattgaatgtacagcctacatatggtgccaacactcacgcagaggacctgcagcccccacctgggaggctggagcaccacaggctctcatttctagaggcctggccgggtatggccctaggcccctcctcctgtggcctttacctccgggggctgctgcaggctctggctcattccaaaggtggtttgggataagcgggttcccaaactaaatgtcgttatttgtttcttaacggttctggaccgccccagctgtgtgtgctcacctaaaaacatacacccacaaatagccaggaaatggctgcattctagacctttccggagtccaccgagacacatggccaaccaccccagcagaacagccgcgggcgagggaaggaaagtgaatgctcaaagcccggggcaacagcaggctctggctttcccagggacaattcgggatggctatggctccgtggacatctttttgccttcccactgcccctacagaaagctccaaatgccacaagtcagggatgcattcacctagctctggagaaatcggggtgtcttccccgtgggtcatgttggtggactcaccccaactatgagcgctggtctaattctaccgagacagcgccaaatgtgtggctgccatttttcggaggcttgcctctacttcatcttaactcagccctcacattcagccagtgaggactatgtcattcaaggaagacactgaggttcagagtggtgataactaagacaacagaatcaataaaccatggattggtctccagaccaggacccttactctaaatcctacactctatctgcagaaacccagagctacgcttcctgctgcctgggacattcctgccatgcctgggtggctgtacagcagatctgtccccaataacctgacctggccaccccagagattcccaagtcagtcctatgctcatggaaaaccgggaggggctgggaacctgacctcggaggcctatcctgactccctgtgattcagtgtcaactgggaatttagggcaatggccatggcctgggattggatgacttcctgcctgtcagtttgggggctccccagtggctcctgggctgtgtccaggagtccccagatgtcacaggtggtcctgggaagatggcaccaaagatcaagggccctgggctgcaggccactgccggccaccctctgccactgccggccaccctctgccactgctggccaccctctgctcctggaccagcctctgctcctgaccatcacacagttcccctgtccctctgcggctgctacgtttggcagtccctcatgcatgggcccttgtaacgggctgacccaagtgcccaggggctagctgccctgggccagctcggaaggtcccatctttgccttctctgtccattgctccaccttaaaccaccttctatagctccttggagggccaaggggcacaaacgggtaagaacccatcacccaaaggcccagacccctggagtctctcattgtctccaagaaacacacacacacacacacacacacacacacacacacacaaacacacaatcactcttctccatttctcctccaacgtgtgcatggaagcgggggtggggagacatcttcatggagactcttggcctggcctggccaagttccttggggtgggcaccctgtactctctctctctccagtctcgaagcccccaacacggggtgcagaacgcgtcctatgggaacccctctcactgggccctgcaggccccaggatgagcctgaagtgctcacaatcccaccaggctcctccagcagccgcccccacccctgcaggcccaagcagagggtgagggtgggaaccgaaaacaaggcagacgccacagcgccaggaggaagagacaggcccagagatgtgggcagccagggtgggtgaggccagggtattgaagcccgggccaggctggcgccgggaactgcggcccacagaggccgaggggcctgggggagacgagggagtccccctctgtccccagtgcaggcctgggactgcactaattccgcattgggtggcagcgcaggacccccgtcccctcccccaacgccccggccggccggcgggcaggcggctgctgatgctctgtgcgcacctccccacggggcatcctggggatctggtggctcagagtcgccgactttcctgcccccacccaaccccaactcgccagccggagcttcctgcgcagcccccaagattgcaaaagtctggccccagccccctccccggccagagctcctggggcctccctcgccaggcgggtggcccacctcccccgcctccccggaggcccggcgcgcggtctgcgctgcagcagagctcggcgcccccgccgccacctctgcgcgccccccggctttcccgacgctgccagggaggatgccccgctccccgccccgagtccccagcggcccggcgcgaagttccccaaagtgacccgggcgccgagaacccccgccccctcccctcgggcttccccggagactccgcccgccgccccctcccgcgccttcggaaaagttgcgagcgacgccccaaactccggcccccccgcctcgcgccgcgcgcgccctgggcgcccccgcgctcggccgccgcgcaggggcgcagttccccctaccccagccccggcgccatgacgcggggagcgcagcgggggccaccggtggcggcggcggcgcagaggcggccaagtgcggggcgtgggcggcagcgcggggcgcacgtgcgccgggccgggggccggggccgggcggggggccgcttacctgttggaggtagaggaaggcgggcgggcagggcacggagtgcgggagcatgctgccggagttggacagcaggaggcagcccgagttcgccatggagcacagcatggggcggcaggggggcgcccggcggcggctctgcgctcgctgcgtccctcggagtgtgcgcgcgccctgcctcccgggcgccctcccggtctctctcctcctcctcctctgggcctcccctccccctcgtggcgctctttaagagggaggcatcgaaaggagagcggcgcgcctctgcccggtgttccccctgcccgggcggggaggctggagagagcgcgcgcgagaatacggccagagagtctgtgcgcgagagatcgggcgagcgggcgagagcaggagtcagtcactttggagcctccggagccctgtctgcaaagagtggtgcgtgtgcgtgtgtgagtgcgcgcgtgtgcgcgcgtgtgtagcggtgggagggggagtccctggcgtactccaacatcaaacggagccccgcgcggagggaagagaatccggagcgacggcacaacagctgatcccacacttaacccctcgcccgccggcaccggggcagccctccctcgcgccctcccacgctcgggcccctgcgcgcccctcctcccccccgttgccagcacttgctcctggcctggggggtctggaatctccctttgcccccgctccgttctccggccgctgcggagaggaggagccgctccgccggctctgcggccgaccgaccggaaggcgcctcgtcctgtttcgcgttcagagaagcgcctttcctaagggaggccggctcagtggcggggatgtcggtgatgtaatccgagggcatctacgcagaggcttccgcgctggggaaggcttctctggctgcccagggcttggaaatccaaccagagcctccaggagcgtctcctgccctcctgctggcccccagaccccatcatacatcccagcctcctgccacaggcacctggtcttgtggctacttagatgggggtgggggacacgggcaccggccacaatgcatcctcccctccctgtacccagacacactggacttgacgtgtttcgctcccacgggacaggcgtgcataggtccccacctccttgccccattcagcatgtggcagaggtctcggcagtgccccttgttccaccactgtgactgtgcacacacctgcagcttcagcggccacacacacacccactggcctgccccgagtccacactcaccagaggccccgtggatcagtctcagtttaccaggataagccacaggtgagcttggctgcaagagggatgggctgccagtggccactgtcagaggcagagccagtggctcatgcctaacctcacgccttccaggaaaggggcagatcccaggcacccagtacccattctgaacgcacctgtcctaccttagggcacttgtgactcccctcctctcactgcagacagtgagccctgagctggagggaggcaggcctggggccgcctggcagtggggagatggctggcccggcagtcatgtcggaccctcacttgctgtgtgatctcaggaaggtcgattgtccccttggggccttggtttccacatccagcccgagagatgggtcagatgttgtctgagatccctgttgcacccactgcaggacacgtggcctgagggccattgaggaagagggaacaaggaagggagggagagaagggtggcctctccacgcccagtttaggaggctccatttgaacaaggcaggtaggtgcaggcacctgggaccattctctcaggtgccccttgttcatcttcttcgtagaggagctgggatgtggagtccgggagggaggcagacaggggaagagagaaggctcaggggagagacgaggcaggcgagctggccatctagccgtgtggtctgacctgcaatcctgctctgtgttccctctggggtggtgctggcacaggacaaggatagggggctggtctgtctccacagggtcttggctatggacttgatgaggccctccctgctgtcagtaacttggtttcccagcctaggacagtggtgggggtcccagcgcaagggccgggcatgcctgggccaggaagatgaggtgggttgtagcatttgccacctgagcctcgcagaagggctcctcgtgagcgtggtgccctggagtggcccttgctgcctccctcctgagtcaggttgttcttgcttgttccagaagccatccctcttttgtcttctctgggcacctgtccgtcaccactgccctgctgcaccttccctggaggatgctcaggaattcgggacagccacatagcattcagccgaaacccaggctccagatccaccctgcctgtgaatcatttgctcattaatttgccattatgaccattatgaccaagtatctcctgtggaatccaagcctcatcccctccagaaagggatttgggagtgcttcctaagccatgcctgacacagagccactttttgagtcaacgctactgtttttccttattgagaacccactatatgcagacagtgtgctcggtgctggggctgcagaaatcaagttctctgccctggagtgagcacaccgtctagtgggggaaaccaagcttgtaaacgaagactgcagcctaatgtactgagagctttgacagcccaggacagggagagctcagatctggggtgtggccagggaaggtttcctggacccctgagctcagtcattggcccaaagaaagccagggtggtccccactatctgcatctgcatcacttctggcagccctgcatctggtcacctgtgtgcctctctgcccagccacctgccttccagcctcacctccagattgcactgggcccaggagcatgtctggacacctgcctccatcaggcggctcatcacacccagctccagagagagaggactgagaatagcagaatggaatgaaaataatacctccagaaaaaggatctgaacgtgtgtgtttggcttatttcttgggacaggggctgttacgctgtgcttcagcacgagccagttagcgaacagcacgcacctcagtgctccgctgtgatcgtttcagagtgtcgcgcaggcctgactctgcggaccccaccggcaggaaccatgccctcatcacctcctacctccagtacctggcaccagggcggtacgaagcttttcagattctccaggccccatgcagccctcccgagcccctggtgccttgtggactggggtgggtggccctgagcagggggtgggggaagcctgtgctcctggtggctgtgctgcccccgctcctggggcggagggaggctgcgtgctgggaagagctgtcactccagtgctaatattcactacttaaaaaaaagaggcaagaaaaaataccccattcgccctgaatctgagaagggccttgttaggcaggcaggaactgagctgtaattatttctgcgctcctgggcaccactataaatatcaggcaagggaggcacctcagaaggttccgatggttccaaggctttggagatctcctggctccttcctgcccccatcctatgtcaccttccctggcaggggccttggagggtgcaggcactgcctctcctccagttgggcagggcgtgtcttccccagcttccctgagcgtgcctgcctgggaaattctggcccacgtaaccttgccagatgccctgaatctcttcagtgtgtacctctgtgaaatggacacacaggattctccctgggagagcatttgctaaaaggtgtgcaggggaatactagactccaaggtggcctgtgtttttaacaaaaggtgggccaaatgagtcctgtggtcagatgacttgggggagtatttcttttgacccctacccatgtcctttggaaattcccaaggtggcaagtggcaaatcatagtagaaaggaagcaactccacactccctttaggggaggaagggaggtgaattcctcatgctcctgcccctctttccccttccaggcgcccaggccgaccatcctcaggcttcccctgcgccgtgaggacagtgtgcagcttggcagcagcgctcccaggacaaggagtgagctcacagtctctggttgcagctgtgcttggccgcgccaagccgagccttcatcgacaaatacatcgtgctttccgcagagccagaccttcctgccccagccctggggtatttggcctgggcttgggcatgagcactgggggacgaaagaggcagagtggcagaactagatctccacagtggggtggggtgggcatggctcagggatgggaggatgtgtgcgtgcctgtgtgtgtgtgatggggtgtggggagagccaagaagccactctgaccagctggagtcctgtatcaccatggaacactttgcaggggaattaatgtcccaattcagcagccagggcaacagggttggagtcagggagaagcccccactcaggctttcatgggatgcccccagcagacaccacggggcaaggtcaggctggggatgggaaacccagcagacaccatgggggaaggtcaggctgcggatgggaaacccggcagacaccatggggcaaggtcagcttggggatgggaaactcgtcagcctttttttaaaaaaatgtagaaattctcacattcccagaggaggcggcttccttatatcaggagtcgggggctgcttccactttgttctggcctgtttaatctccccagaagggcagaaaagccggcagagggtccctgcaagcaggggtgaagcaagcccagggatgagccgtcggtgcagccctggcaggcgaggcctcgctggaggtggccagcagagggcccactcacaccaccttcaccggctggcctgcgaggaagggctgctggggtgctccccacccccaaccccctctgcctccctctgccaggggtcctcagcagtgcagagggaaagctaagcccagcccagctgccggggccagcactcaccttccggctcagcgggggtcccccacccactggcactgtccccctggccccagcagagactgcagcaaaagtaaaaatcggcgtgcaaaggaagtttatttatctgtttaattaagaggcgtttgccagccacattcgggtccatccgtctcacttacaaccatgtcccagcaaaattaaacataataaatacagggagactgaaagcgaagggcacacttgagatatatgggcagagccaggagttgcacagggttgcagttataagcacatctctctcttgcaagttcctctcccctcgggggcccaggagccggaggaatgcgctcagagaaggggctgtgggtgccgctcactctgctccttccactccgcactgttgccaagctttatttattttaaatgagcccccaggacttctcccttctcctcttctgtggaaggcgagcgagctctacaccgagcaaaaggaacatctgaaagcagccagcactgtgatgttccaccccagggctcggtgggtaagaggccttggaagctgcggccctggaaagctcgttgcaagctcctgctgcatctgggccatgagctcctggcaaggagacagcctaggctgagcagagcctgggagaaacagatctttggtcttcagtgccagctgtggccaagccaccgtttggcaaactgggcccagaatcccacagaagccaaaggaagaggggggcactttgatttctgtctctcatctgaaggctcaagagcctggccatttgcttaaacttcccaggaacagaagcacacaaagggggagaatggcaatttattattactgattgctaactgtaacaataccttgtatctgctcagtgctttcctaaccttttcaaagagccttcatgtatctcacctgatcatcacaagttaggtagggaaggtgtaatgatgcccattcgatatatgatgacccttttaggatcacagaggtggtccaaggtcacacaaccagttagaggcagcgtctgggccagaaggcaagacttggaacttggatttatgggagcccttttcttcccttcgactactgtgctgggctcatgcccttctgtgaacatgctcgtcgttagcccttggctctctctcctaacaggatcaaccccaaaccaaatccgttaatgtaatagtcatttgcaatagcttgggcgtttactaatcacaccaccgctccgtctgtgcagcaattatctcgaatttcctctttctcattaggcaggaggtcgcgaggactcagtgggttgctgagccctgtgatgacgccaaggagaggagctgctgctagaccaaggaagccctccctcagcgttcctagctgatcttccatgcagcgcccaatttcctgggccctcaccccgtgctcagctgacccaccagccccgagccctcctgtcctgcccaagcctgtgcatgtgtgcccttgtgcccagaccatagatggctacagaaaagagagtcctgaatggcttgggaagttgtatatttgcttggagatgatgactccagctcggactgggtatccagtgaagtgcccttggatggttgggcccccactgcagacatgactgatgacagcctttgctcctgccagggcagggatcgcaccagccaaggaaaacccatatcactcgctgctccacgcagcccacccaggaggcatgcaccgctaacatcactcttggtacccccacttgctctccttcagcatcagggtcaactccagcctcctgtttgaggtcacctctttcccccaatcaaataacagagtgaaggccgggtgcagtggctcacgcctgtaatcccagcactttgggaggccaaggcgggtggatcacctgaggccaggagtttgagatcagcctgggcaacatggtgaaaccccatctctactaaaaatacaaaattagccaggcgtggtgacacatgcctttaatcctagctactcgggaggctgaggcaggagaatcacttgaatctgggaggcggaggatgcggtgagccgtgatcgcgccattgcactccagcctgggcaacaagagtaaatctctgtctcaccaaaaaaaaaaaaaaaaacaaaaaaacagagtgaagaagaagaaaggagtcctcagggacaagagtgatggggctggaaggggaagtggcatcacgtcgcccagtccccggccttctagctggcagacaccaaagccttcagagacacgtgctctcttttttttccccttgaagctctccactgggggagaccctgctgtctctccggggagcccagttaggtttttatcaccctgagtgccaagaaactctgcctcgtggtacacaaaccttttccgtcttaattttattcaaagggtgaaggctttgaaagagtgacaagggggagcttagaccagaagctgaagccactgccgctccctgtagctcccaggagggactggggccactgaccaaaacttgtagagcaaagccgtgcataaagggagggggctgagtgagcacagctcttgcataccgatggggaacaggagccctgcactctcagggtgtccaaaagggaagactgtacacacaatgtgggtacaatttgggtagctcccattgctacggccggcatgaatttgcaccatgtttggttagaattgaactgaggaaacagcattcagggttcctgagtagagacccatgggaagaggtcaaggtttgttcttccatcaacagcgggtgggtctgagctgacccctgggtagaggcagcaagggtccacctccagcagtgaagtggctgggtgctcccatttgccatcaatttttagaaaatcttacttaacagagaaaccaatatcccttcctccagcactgggcaaggagaggccacatggagagcacgtgcagcactgtagagagggaatggtggcccgggggtaccccgcaccccaggactgggaagttaggaccttcaaactctgaccaaacctgaaagactctggaaaaagcagctgcctgtagccccagccccagcactcagtgagttaaaaagcaaccgcaaggcctcgggaaacagaatgtgaggggcgggcactctgttcgtcccctgcccctgcatgccccctaaagccaaagcgtcagctcattaaaagctcattaggagcccaaggcacacaaaggcccggagaggcattactgtcctggcagagtgcgtggccctggggaggccgatgcactgctaggcagccagtgccaagctgcagacaggggccgggccatggagtgacgaggcggccggcggcgggaggtaggggtgcaaggtccttctaacgaagcctcatgggagctgagcttgtcccaggactcaagggagtggggacgagcatatctgccaggaagcaaaggaacagatgcagacggtaacctacagactcacctccccacacctccacaatgacagaggccagataagagttcctttctcaggctttgagagcaaggagaaggcagggttaggcaggaccctgggcagcctcttccctcccggcagcctaagatacaccagggaagttgtgtgaattgctgcccggtgagcagagatggggcagtggatgctgatgtgttttagtccctaaaagttgcccaagagcaggggaagtgcctatctggtgggggtgtggaagcttgtcttgagttaggtgtgaagctattctgaggctgccacccctgccaaccccctaccgtctcctccctcttgatcctgggaggaaaatccctcccctttcctgatccactctagcattggggtccagcgatgttttggccccaacacaactctccagttccaaggcatgaggtttctgagaattcactggcaaggaggtgtgggaagttggcagccagctgagggccctatgctgctcttagccgctcccggcctttcctcccactgagagttgctgcatcaggatgggggggagccgtctgttcctgctcttacttccctaggatgctgtgacttttgattcctgcttgattaatatacagccaacagagactgtatttaaggcagctttaattctctcaggtcaccaaactcgggagcagcaaagctgcaaggagccagccccgcaatagatcaaacaccaggaccttcaaatcgctctgtggcccaatttcttattgctgctgctgcctgataaccctcccagcttggaggcaatagctcctttttctaggggtggacacgggggctggatgtggatgtccatggctgaaaccctcctggcagcacggaacgagagctggaaggaccgggcacgagagtgagaccgtcagcaccagggacagctccagccagaccctggagccgccgtggctgcctacacctctgtctccctgggcccaaacaagcacgggtgtcagtgaactctctgttttgcaggggtggccagcggctagccctgctgatggccaccttttaccaaaacatcctcgcctgttgagttagcctgctgctccctttggggccctgcacactctcactggctctgtctccctttaggagatccagcttttgccatccctgacccccagagggaagcaggctgctgtgaggactatctgtctggcctctgtgccagcccctggtgcccagggcttctgtggggccaacagtttccttcctggctgaacctcatccgcttccaacttgcctcattagcatctcctgaaaggcaggctaattcctctgctgagcacctgggtgttcacttgctcggtgggggcaggggcaggcatgccggcatggctgccgtttcctccaaagcaccttttatagacctggtccgtgttgcaatttgggaggcaccggggagcagcacaatgtggggagattacgctcggaagccgggcttgtaaattacctcccagtgggggcagggaatgtgcctattaacagagaacctggtgcacacagccattctcatttaagagcaggatcttcccggatcagactctgatcaatccttgctgccaccaacacaccatatattaggaagaaatgtttgcattgaagttggaggaagccccatactcacctccccccgccaaccccctactgctgttttattaggattttctctaaacccagccccattggatttattccccctgctctgcctctatccacttaaaaatattgtctatggattttcaaattattgctacactttctaagagaaggatgcagtggttaaaaattaacagcaaatttatgggaattctatatggcaattacagaattataatgaagtggctgccacttggctgagtgtgggtaattggaaatccacactgggaagactagaatctttactgtattggaattgtgtttttgagagtaaatgctgtggagagggtcaatggagccttgagtaggccaagttcttctctacaggaaaaagtggtctgctcactgcctattgggaggcaatttagaaggagaatcacttatgctggcccacaggaaggtggctggaaaccactgggggaggtaggtgttccgggctaggggagcaggcctgatggtggaggaggtgggagtgggagagcatgaagggaggaaggccagggcatcaccagcagagggaaggcccactgtggtgcagctcgagcctgacagaaggcagcaccgaaaccctgatgttctccctgccctgtgggttcattttccttggaaaaaaattttggtaaaaaaacagagatgattttatcatgaagacaccaatgttgctctcctttcacatggcgctgtcctcgctcccacagctgctgtggtagaaatggactttgcctctgatctcctctgcagctctttagggccttagtggctgagaggtggagcaggagtctgtgataagggagcccagattccgagcaagggggttctgccaggaatctaggtacaaactgcctcctggaagccaggtgcggtggctcacacctgtaatcccagcactttgggaggctgaggcgggtggatcacttgaggtcaggagttcaagaccagcctggccaacatggtgaaaccctgtctctactaaaaatacaaaaattagccaggcatggtgggcatgcctgtagtcccagctaccggggaggctgaggcaggagaattgcttgaacctgggaggcggaggttgcagtgagctgagattgcaccagccactgtactctagcctgggtgacaaagtgagagtctgtctcaaaagaaaaaaaaaaactgcttcctggttcttcaagagttttgtgtagacctggtgctgttgagtgcaggggccacgggccacatgtgggcattcagagctaaaacacggccggttctaattgagacactccctgtgtgtgtgggtgtgtgtgtgtgtgtgtgtgtgtgtgaaatgcacatgggattttgatgacttgggaccataaaaagagtgaaaaaatagtttgtatctagattacatgtcaaaatgatcatattcaggtatattgggttacataaagcgtataattgagtgcccccagttttgtttgttttactttctcaatgtgggtgctgaagaattaagcatttccatgtgtggcctgcattatgcttctattgggcagctctggtctagaacatgggcagatgtctttccgctcagccccaccgacatcagctcactatcatccccattgcctgcgcggtgcctggccacgggtagcctctcaagaagaagtgcaggccgggtgccgtggctgatgcctgtaatcccggcactttgggaggctgaggcaggtggatcacctgaggtcaggagttcgagaccagcctggtcaacatggtgaaaccctgtttctactaaaaatacaaaaaataagccggacatggtggtggctctcgtgcgtacagtcccagctactcaggaggctgagacacgacaatcacttgaacccaggaggcagaggttgcagtgagttgacattgcaccactgcactccagcttgggtgacagagtgagactccatcttgaaaaaaaaaaagaagaagaagaaatgcaaaatgcaaagccaactgggtctcttcttagagtaaggccgcacgcaagtctgtgtgggcaggaagcctgccctgatctccccatcccaaaacacagacacccagcaaaagggtctgctccatttcagtctacgtttcttggtttctgtctgctctatcctgatatctgagactggggcctccttattttgtcctaccattgcagctgtgcaggcacacagtgtctgctgaggccagtggtggggtggcgggggtggctttccttctgtgctccctcccctacgaccggacagcaccaggaaaccagcactctgttttggggtttggggatgagctcacaggcaaatacttctgcttcctaacctgtgacctgtgctaggagaaagtgtcctagtggccagctcccgtgcggctgcactcgcttgcatttggctgctgggtgagcttattgatttttctctccgaggtagaaggagaggcctcggaaatgccattccagtgaaactgggcatggcgataattatcatcatcagaacaccctggacaaattggatctcaggcacccagagcaccctcagcctcatgctccaccccagcctcctctgaaggcagagggaaggaagtgggagggtgaatattattcttcccatctcgttggatggagaagctgaaacccagggtagaggagtgtcccaagatgggaagtggaggccgggatgcggggtcggagtcactgcccccttctactggagaaacagcagcagagtggagcttggatcatcttgagctcctaagaagactgtagtcccgcatctcctaccttctaccacacacccagccacagctgtttctcacaccctcctccagcagaaagtggggcccgctccagcctgggagtcacagacccggagtccagcccatctctgccccgaccacccgtgggactctgagcgagcaactaaacatctccagtgttggtgtctgcgtctatcagaatgggacggcagtacctctctcagtatcgcattcccacaataccttgtgaggattcaaaaacatgtcatatacaaaccagctggcacatagtagatgttcaataaatcatggtaattaattcaacaaatacttattgagtttccccaagtgcctggttttgttctaggtcccttctctctgcagtgcccagatgagactgctgatgaaatttcctctcttcacccggatggactgcacttgccctgctcatctcctaggccttggtacagaaagtacagttaactctcaattatctatgccaatggagtggaacgttccactgataattcagaaagagcagagagtctacagataattcttatttgaattaggaatgcattatgcttattttcacatcgggtttaccttcctaattactgtttgttctggattatgctcaaactggtttgcattctcagaactcacatcggtgtggtgaggggtgtgccgtggaagtgtactggggcccaccaagtggaaaccagccacagaccacctctctgcactgccctccagcaccccgggtggactgacgcctgctaacagggaagtagtaggcactggggctgcttggtatctgcccgggaggaatggtggcagctccttgcgtgttgttttaaggctgtgcccatgtgggtggctgggcacgcgtgggtaaaatggaaggaggtgcaccagttcctgtgagctgtgattctccccagaaagccaggtgcagacataagaggcatcctcacatgcagccctccgtcggggctgtccacatgctgttttctgtctgtctcttctctgtgtctcccgctacatctttctttgtgtgtgcatctctctgtcactctctgcctcccctccacactgccattcactgcactcttttctctgggacaaaccaggaaacagatatttcttttctttctttctttcttttttttttttttttttgagacagagtctcactctgtcgcccaggctggagtgcagtggcatgatctcggctcaccgcaacctctgcctcccaggttcgagcgattctcctgcctcagcctcccgagtagctgggattacaggcatgtgccacaacatcctgccaatttttttttttgtatttttagtagagacggggcctcaccatgttggccaggctggtctcaaactcctgacctcaagtgatccgcccacctcggcctcccaaagtgctgggattacaggcatgagccacctcccaagcccagaaaacagatatttctttctacagacacatcgtccacgcagccagggctgcagatggtcggggcttgtgtctagctgggcagttcctcctaatgccactccattcccctttgtacagcagagagggacggagaaaacaccaatctaacctcccaaaccacgggcaagcagggagccggaaacccaaagaaaagcctgagtctctgtgcccttcctcacctcccccgactccgggcatggaagggggtctgccctgcaccaggcaaccaagacaacatctatctgtgactgcggcgcgtgcttctgatttcctaagcatgccgagtgaatccatcccgagtgcctctgtctgcgtcaggagagtcgtgtggggtgggcttgtcatcccggaagtgctacggttgcatcgtgtggggtgggctgtcatcccggaagtgctacggttgcatcgtgtggggtgggctgtcatcccggaagtgctacggttgcatcgctggaccatcctcaacactggaccagaccagaaggggaaatcatgggtgacaaccgcctctggccagccctctgccctcgcccctgccctgcacctctccatcccacatgaggcgaccttgcaggcacaggtgcggacaggaaggagagcctgcacctggcgatggtgactcaggggatgtctttccagctctcacgggactcagtgctaaggtgacagtggaacgctggcatctgtgtcccgcctgccagctcatggagaaagttcacaaatgtcacctcagtatgcctcactcaagcctgtgggacagatgggtacagctggagactgaggcttggagaagttcacagactttccaggatgtattgcccatgccactcgtcactctgataggacttttagagatgtgagaagcctccctgcttttgaactttctctctctctttttttttttttaagatggagtcttgctctgtcactcaagctggagtgcagtggcatgatctaggctcgttgcaacctccaccttccgggttcaagcgattctcctgcctcagcctcccaagtagctgggattataggcatgtgccaccacacccagctaattttttttgtacttttggtagagatggcgtttcatcatgttggccaggctaatctcgaactcctgacctcaggtgatccactcgcctcggcctcccaaagtgctgggattacaggtgtgagccactgcacctggccgagctttttgatgcctaatattctactgcttcccactggttaaaatacaaattgtctcctgcaaagatgctgagtttgtgaggctgaacattgcctgtaactcagttgtgaggctgttgactgagaactggtttttagggagagagggaggagacccagaaaacagtgggaagcaagtgggggctgtctccatggagtgaaagctgcccagcaaagggtgcagctgtggtcatagggtggggatgggaaggcagactctggctggctcactctgccttctgagaatgtaaagggcctttcgaaaagacctccctagccccccaccctcggcagcaccacccaccagccccttccggtggacttcacacctgcacggcacctcctggctctcattcatcctgcccttcttcttccagcaggtgggagggtcagactcagaggagggagcattcccaggagcctccaaccctctgcccaccgccctactgcaggagttgcagatcttgggggtctctcagtgggggaaatcagcccaggtgggacttgaggaagaggagaaggccagccatctggatggcctgaacccagtcactgacttagggctgccagtgacctctgtggtgggaacaggtgacctagaacacactggtttggtcccagttcaagaagtaattagatatgctctcaaagaagtccccaaagctttaattaaactccaataaaagtgaggctcagtccctttgttgcatgagcttcatttccaagagtcacacatggctcctggtgaccatattgacacagatatgacattgctgctgctgtaggatttctgaagcacgctgaacaaacccaccctgatgctccagtctgtcaggagagtgtctattctacagtaccgctctaaagcttcccacatctcagtttccttatctataaaatggggagaaaagggccggacgtggtggctcacgcctgtaatcccagcactttgggaggccgaggtgggtggatcacctgaagtcaggagttcaagaccagcctggccaacatggtgaaactccgtctctaccaaaagtacaaaaaaattagctaggtgtggtggcacatgcctgtaatcccagctacttgggaggctgaggcaggagaatcacttgaacccggaaggcagaggttgcagtgagccgatattgcgtcactgtacttcagcctgggtgacagagcgagactccgtctcaaaaaaaaaaaaaaaaaaaaattgggagaaaagtaccctccttaagtacttcccaaggcccagtgagatgacagatggccaaagccgagtgtacagatcatcagcaaggtggcctgtgcccaagctgctggacaaaccctcttcaccacagccactcccagggagtcagaaggtggggctccagggaaagccaaagcctcttgatcaggcagcaggcaggggggccaccagctgtcactcaggtgtcccacctagtctaagagcaaatacaagaaaaagaagaaaccagccccacagacagagtcacaagacaggagtggcctcagcacagagccaagaggggcagaggtgccgccggagggacagcggtggccgagcagaagccagggaccccacaccacctggctccttgcagcgccagaggagagctgttcagggagggccttggtgggttgggacatgaggtgtctcaggtcacgtctctggggagttgagacgccaggagagctctgctgggctgccaggaaccctgacgtgaactcaataataaaagcaaacgagaactttgcatggagggtacagctttgctggggaggggaaaaatccacaaaactgatgggggatgcacctggacccctggtcccccctacctgatgtagtgacaagtcccctccttaggccatatctgggaagccaagacagaagaaatccacccagcctttcaccccctcctgcgtcctcgtctctgtgtgcggcgggcagctgggcctggccagtcccaattccctcaatatgagcctgtccctcccagcccttcactgccctcagctccttcctcagccattcccacacgtctgtgttctccccacgactccttctctcctctcttcccaccctctccttgtgtgtccttttagccatcacttcttaacaacaacaacgacaacaacaacaacaagaggtgcatcagatcatccggatccgatggagctgtaaccagatccacaccagaggcctcagcattgccctgacacacagagtccgtccgcccactgggctgctctctcctggtctccaggttggaatagatctactcttattggctcagaaagtaatgggctgagagagggaattctgaatactttaaaaagggaatgtgggggatgacctgggtgggagaggggagggagggaaaccagaggatgttttgctcccagaaccccggcagtggcagactgtctgccagaataccgagaagcaggtggcctgctgtgagctcagggagggctttccagggctagggagccctcctgggcttctcaagtctgcctgggctgcagttcctggtcctgaaccttcctttcttccagcattttcctcctaaccctggggcattcatgatttctgtccatcctctcaggaggggactgttcacgatctctcttctctctctttgtattttctggaacacggaaagtgcttctgacaggtgtatcacatcttctgcaatcataacactcttgcccctcggaggtggcggaggtggcccatggcccccatgcccgcccagtgccaagctcacacacagcaccccctgccttctctgtcttcaccccttcccacgtgctttctctcctccacacttccctgactccgctggaggctgggggagattgacgaagagcctggggcagacttgggcaaacttcttgaaaagttgccttctactttcaggcctcctctctctgcgtctccgcccctgcaggagaacccaaatgctcagcttcatgctgacaccaccttctctctacagttactgtctcatcctcctcctcctgccggcttcactcacagctgtcacagtcctggggtgctgacacatatctctggaatctcagcagtcattaccaggagaatgacctcggtcccctgggtgcactgacaggcttccccggcatggggggtagagtagggagggcccaggaaaggagggctctggaggaagacaccccggggtgtggtgtgatccctgcatctgagctggactgtgctctgtcccgctgtatcatctacaggggcctcttatccacagcaaaacgggaggagcctggaaacagagtgggattggcaggagaggcagccctgggtaactctggggctgtgtcgggtaccacgctcacgtataataacagatgactctgtttccccagcccctgaaagccccctctgtgctcacggcagaccactcactcctctgtatcctggtagagtctgccactgctaggggtgctgggagcaatcccttatataagcgcagagccatacagcttacgaaaatttcaccaacaccatctcacgaattcttacaacaaccccatgggacggttatgactatgtcagtgttacatccgggaagagcgaggcccaggccaggggcttgccccagatcgcctggcttgagcccacacagcagacaccaccccagtcccacctccctcctgctcttttattccagccttggctgtgcgtgtcagagcgcacagctgtgatccaacagcccctcgccctaacacgctgcacagcactgcccgccctggggctcttctgttactgccacgtgggactcctgcagagcacactcagccatgcagatgcactatcatgcctggtggtgaaaaggccttaataccactgtgtggggcagtccttggctggacggggagaggacctggtgaataagccatacatggagccccgaggggctaagcccccagcgcccacagtggtctcagctcagtaacgcacccttggattccttctcctttccctattttactctccccagtgcccctccctcctgtgcacttcccaaaatatgctacctgcatgcgagcacttctctcggggcctggattttgggggctcccaagctaaggcagtttgttcctaagatgcctagaaagtggcccctcgggataggattctggagtggggccagacattgctaaggaccacgctgctggtgacagatggggctgtgacaacccctggcctgtgggggcactgtgattacatagaccctcactggcagaggatggggaagaggggcaggtggaggtgaagcatctggctatgctgttcctgtggcagtggtttgagggtgaaggggcgtgtaaggactgtgggggtgggtggagggcgaaggggcgtgtaaggactgtgggggtgggtggagggcgaaggggcgtgtaaggactgtgggggtgggtggagggcgaaggggcgtgtaaggactgtgggggtgggtggagggcgaaggggcgtgtaaggactgtgggggtggttggagggtgaaggggcgtgtaaggactgtgggggtgggtggagggtgaaggggcgtgtaaggactgtgggggtgggtggagggtgaaggggtgtgtaaggactgtgggggtgggtggagggtgaaggggcgtgtaaggactgtgggggtggttggatttattaatggacttagaagctttgaaaaaggaaaacaactgtctcaagctagctgactgtcaacacagggcccctggccttcatggaaatatgtaactagacctttgtctcctaaagcccaggaagtaattgtcaccaattagtttttggtgtaccaattgtataccaattgtaccaattacaattgacaccaatcagagtcaccaaggagcctgaacccacggacatggcacttctcccctgacgaagtccaagcaccgtaggaaagagtgagaccctgggatgagaacgtttgtgtggatgagcctgagaactttgcacccctaaattccctgaacgctctgggctggtggaagtggccccttccatctttgctaagagaaagcagacttttctcacctggagaaccagcaaagacctcaactgagaaattttctcatgagataacacttgtcccccactgagagctgcccctacttcccctactgccatgacagcaatagctagagttggggttcagcacaggccaagggggcaacagccccagctcaggaagaaaacagccacacacccaaaaagctccaagacccagtggatacacaccagtggacgccggggagcggacacacaccagcgggcgccggggagcgggtacacaccagcgggtgccggggagcagggggcgtaggtggggttggggcagaatgtaagtctgaacagaggagagattactgacgtgaaagtaacttctcatgactcagggcttaatatcctggaaaggacacgcgtaccagtccagtgaacagctccttgaagcgcacacataccgacagcattcagtcaacgaggtcgacgcgctggaactactttggtggagtattaaagaaggggtccgaaggccccagatgctgtgaacagagaacccactagatgactctgtgtcccagaagggtatgggggacattccctccactaaggcaataaaaaatgcaattctggggtgggggaccgctgaggcatttggaaagcttcgtggtgagtgccttcacttagggttgccattaggagatgctgccactaactgggctccttagtatcagtgaggatgagaagattctagaatagcaggggccagatagttgcatttaaccatcagaggcaagttggaattaaataccaccgtggtcagccaggctttggagatgaccagggtgctttgaactacagaagtctgcagctaataagccatggtgttcctggggatgaaatggatgggtggccaagtagggtattgcttggcttatatagccaggaaaaaatcaagagctagagagcagagaactcctcagtcatcacaacgggaaactgcagtaccatatccagttccaggtctaaggcagttctccagtcagagcccactggtggaaggaagaccaggtagggcttaggaatgcactgcaatatttataatgatagcatccccatccttccccagatggacctgtggatacttgccagagaacctgtgtcctggggaaggggactagcagaagttttgcaggcaggaggatacatggttagagcagacactgatacctgtgaaatgaaaacaccatcatttctgccagttagagtgggggtccacagaaacccagggatatatgacatcctgaaccacatccatcttacagcaggtctgtcaggctcatggacccatcctgtggtttgttctctggtctctgagtctgcatttggatggctacacttagcatctagcataacctgaatatgagttccctgacgtaggagtgccaaatgggagcctataaaacctccctaacccccagctaagacaggaaatcagaaaaaacagtacaccccagggaacttgcaaaaattatatccactatcaaatacttaaaggaagcaaggatgaggtccccatcctatccttgttcaattcacctacaaaacagaaccctacaaaaaccagatgaatcagagtgggtgatggtggattactggaaacttcaccaagcagcagcctccaattattcacagcagtgttgtatttactggaatagctcgacagagcctctattacttggtatatggtgattgatatggaaaatgtattttccagtccatgtccataaagagtcaaaagcagttggctttttttttttttttccttaaagtagtttgcttttacataggaaggacagcaatacacatttcctatcttgctgcaaggctgcaatcattctcttgctcttttccacaatatagtctgcagggaccttggccgttgtgacattccagagaatatgctcatccgatacactgaggaaatcaggctcattgagctagacgggcaggaaggagcaagtccagctaatgcctgaggaagacctgtgtgtcagagggtgcgaggtaaagcctagcaagaaggtctacagcttgccacgtcaatgaaatatttagagtctggggctttctggaacatccccttgaagatcatgtaaaagcaaatcattgcactccttccaccaagagaggggcacagaacttggtggcctctttggatgctggaggcagcaaatattccccttgggaatacagctctagcctaacacttccaaaggctatccgttttgagtaggtcccagagcaaacgagggctctatagcaggtccaagatgcagtgacatcatcccagtggtgcccgacgtacactgtggcggataaggctgtgtgaggagtctccggcaagtctcattgagagacacagcactgactcctcaagatggttgaggctggccgtcatcttgaagactctgtgatgagctggacatagtacaggggtgcaagaagtgggcgggagcggatgcctcctgtgtccaccttgtctcctctaagccctgcttttcactccagactttgctgcagccatcagctgtccacagatgtagcctgaagacaacttgacttagtgagtctctccaggccaccactgctcagctgtcccctggcaggaacaaacctgaatgtgccggccagttaacaccccatggtgcaccctgcgctgtgggctatggcagctggtggatgcaaccttccctcttctatccctcaggtgggcagctcagaaagtgccttctacaccactcctcagagaagtcctaactggattgagtcttggaaccactccccatctcattgactcaatagtacacctggaatggctttcttcctccccatttcacttttcccagccccctttcctttggctcatttcccaaaataaacctcctgcatgcaagcccttgtctcaaactctgctttggggagaaaactctagactaagacagacaagatttgaaatctgaagtttcccatgcaaagaaaaaagccatgcaagttttctctgtttgcctgtctccccagtagaagagtttccaaatgcttactgggttaaaagtgcctctgcctaatattataattagtagggttgttttacgattcagaaaacagaggaaagtatgaagaagattatcacccatggtctaatgagcttattgggcttaatggttcatatttaacaggaatgaaacgctcctttcccatgtcaccaggacaggtacagagttgaaacttcctctccatgtgcccaaactcactgctggacctgagtgaggcccccagtgtccctcgattagccacctgctcagtggcctgaggccagagtcagggagctacggtcagaggtgcctggatgctgctccacccctagcgaggcctgcactgttcccagcgtggcaccagggccccttgcaagctttaccaagaagcctctcgggttattccctgtggccaggctcgggctgggtccctgggcctatgggctgtggggtcagcccactgggcaaagggatctgggatttcttgggacaagctccaggaacaggaaactttggaacacgccctcctctcgcgggcctaagctcccttcccttttctaggggggtgtctgcaagtctctgtgctgccctctggggaggactggccttcaggaactttcccgtcggccacttggagactggggtgcacaccagggcacctccaggcagcgcctcctgcacgctcacacctcctttccctccccttctctcttcttgctcatcctcagctcttttgcggccagccagtcttgcccccaaaaggaggaatggttatttctttagctatacaattaatcaatgttttggccctttcttttaaaacagtatgggccacaagtccgggaccgcgggagcctcggcaagcctcggctgggctgggtgaaaggtggcccttctctggccagctcttggtgtctccctccctttgttctcccctcacgcccttcttcctgcgtctggagggaaaggcttatttacagtcactgcagaaacactccctctcccctctgttggtagaaccacaaccaagcggatacagcagagctgagatgctgctggcagtgcgggtctccagctgtcagccccgagctgtggctctcaagacaggattcaggcacagaaccaagactcttggtccttcctgcccagccaggctgtctctgtcacacacacacccggccaggccatcccagccaatagccaaaggcctcgaccgcctggaaaccaaaggggctcccctcggccctccaagcagtccggggaaggggtggggctgggagtcagtcgggaaggttgggtcaaggaagagaaaagaggcacttgccttctgctggggtctccaacccctggctgacttctctcttgggatgacttccagcttctggctgtttccccaggtggtatctttgaaaacacggtcagctgttcatcttctcatggaagtgtgggtgccaggcaagtggcattgagcaaccttgagtgaaagatgcccacctggctggtggaggcccttcccgggcagaggcagaggcagaggcagaggcagaggggaggctcttggtggagagatgttgtctgaagccagaattattctgaccgtgtccccacgcttgctcctagggccctgctcctgccttaaggggccccacaggacctcactcccatctccaccctggctgctctttctctctttctttttttttttgtttgagacggagtctcgctccgtcgcccaggctggagtgcagtgatgtgatctcggctcactgcaagctctgcctcccgggttcacgccgttctcctgcctcagcctcccaagtagctgggactacaggcacccgccaccacgcccggctaattttttgtacttttttttagtagagacagggtttcaccgtgttagccaggatggtctcgatctcctgaccttgtgatccgcctgcctcggcctcccaaagtgctgggattacaggcgtgagccaccacgcccggcccctggctgctctttctgtacgtgcccattcctcccctctcccaccaggccacccatgtgagttgtggttggtgatgtggctgggccagccctcctgcacaaggccttctgtgatgtgcccccatcccaggagcaggccagtgcctccttctgggtgcccacattgtttgaaccccatcaccatgtttgcacctgctctgtaactattaatgcacagctccgggacctcccagggggcagggacaaggcttcatccctgttgtgtctccagggctgagtgtggcaggcaggacagaggcactcgggacacacccattgaaccaaacggaactcccacttccaaagcaccatggaacaaaatgtggccggcaccgcaggtgtggcctctcattccccatactggggacttgactttctcctcctctaggcagtgagcacctctgcagagagatgaaccacctcggtaccccagtgtccagcataggtgtctgcacatagtacctgtcccataaaaataagcaggacgaggttgcctgcagagacacagcaagaggtggggtgcatggctcacatgtgctatgaaaggacggcgctggccgggcgtggtggctcatgtctgtaatcccagcactttgggaggcggaggcgggtggatcacgaggtcaggggatcgagaccatcctggctaacatggtgaaaccccgtctctactaaacaaaaacacaaaaaattagccgggcgtggtggtggccgcctgtagtcccagctacttgggaggctgaggcaggagaatggcgtgaacctgggaggcggagcttgcagtgagccgagatcacgccactgcactctagcctgggcgacagagcaagactccatctcaaaaaaaaaaaaaaaagaaagaaaagaaaggacagcgtttctgtgtgcgcacagaggcgccttagcaaatcctgcaaaaacaacagacacacaggctcagcttctgccctggctagataacctctggagcccgagggaagagtgtacctgcctggggggagggatatggagtggggagtgcagggggccacccggttagggcaatgggcaggtgcctggtcaaggagggaggctattcttttgtgaactttttttatttcttcagtgttttttcagagttggacccccggcgtcttcacgctaatgccaccgtcttcatttctctctggctgcatctgctcttcatctccatgcggttatagttttcacctcgctgtaatcaggggtcctgctttttcacttgatgatatacagagacggcttcccttgtacggggacttcctacccatcaggtctcacggccgcacaatatcccatcgagtgcccgccgcatacttcacgtaactatccctttacggcggacaggtaagatgatgccagaggggtttcttctgctgctataaatatcttggcacgtccagcttttttcatcttttgaattatttctcagggatatggtcccggggcgggattatggaattgaagggtcgggtggctcttgtcctgttctgccagttgcccttcaagagatggggctggggtaggtgatgtggaggagtgccctaccaccctccatctgcacgtctggtgcctggtggggatgtgcagcatgggcagagggtgcagcccgcagcaggagctcccaaacacaatgagggtgccgagttttggagtttccaacaccttctccagcgtccggtgatctcagtcctggtctcctctaggcagcgagcagtgagcacctctgcagagggatgggccacctcggtatccccagtgtcctgcacaggtgtccgcatatagttcttgtcccatacaaataaacaggaggaggttgcctgcagagacacagcaagaggtggggtgcgtgactcacatgtgctatggtgtgcggcttgggcagagggtgcaacccacagcaggagctccaaaacaccatgagggtgccgagttttggaggttccaacaccttctccagcgtccggcggtctcagtcctgggccacggagcagacggtgggaacacaggcttcctggcaggcagcacggcccgatgcgggctggtctggtgggtggctgtggcttccgtcgtggggaggcacaagccctgaatcaggatgctcattttggcacacggcagcctgtgcctctgaccctgccaacgccagcctccgccacctcctgcccgctcagcctccggaaccatgagcaggacgttccagatccgagctgctgacaagccacagcaggcaggaagataaatggaagggtccttaatcccaacttctttccataattaagttttgagatcatcgtatgctgaacccaggtttcagcagagctgctgggactggctccaggtggacgctggcgtgcagttaacagggataggggccgtgtcgctgctgccagcagcctgggagagccctgctactcatcccctgcggatgcctccttcccacgctcagactccggggggctggacagacagggaggcagctgcagataccccaaggtcagagtcccaggctccggcagggctgtaccccggtccatctccagccctgactcctccaatcctaatatgacttctcactgctggttggggcatttctagatccctttaccagaaccactggtaactctcctcaaagcaaccacaacgctttgccctggtcctcccttaagccctggactttcggttaggccctctcttagcacctctcctggtcacctgggttgtgccaggctgactgctgggcacggggatacgtgggggggaacaagacagatgagacccctgcccacaaggaactcccccagcgggcccaggaggttgtggccaggccaagctcccgaaagctctggtctcctggggtcttggaagacaaccagccagcaccctccctcctggagtcccgctgcattggggaaattgaccagcgcccaaagacgggcccacctgggcatcttcgaccatgccagggacaagacagcagaaaaatggccccagggagaagggctggggtctctggactcttctccaggaaaaccttcaaactctagacacccttggccacccgctgccctgggttcttccaggctggggctggggctggggcagggctgctccgcctgggctcctacgtgactcctttctcctcctcccctccccatttgcctgggaggaaggaaggggccgcacttgctccagcctctctggctgctccttccttccctcctgcagccgggctcctggcgctgcccgttcccaatttctccttcctgtaggactgctgcaggggccaccctgtttttagggggtcgggtctcaccctgggccccccagtccgcaactcctgactccttattctgcacttccttccttgttcttcataaagagtagatttcagagcaacttaacttctttcacaagcaaattcccagagcctggttcttccccagccctggagggcctccccgtaattgcaggccttactctctctgctccttttcaatcacaaatgtcgctgacagtccccacactaccacttgtttccccttttgtcctagaatgagaaaagcaggctgtggggaggggcggggaatgggagaaagtgcctggctctaaacagaagccaggcccattctctcccttaggggacccagacaacttcctggggcctggaaacagatgtcacctcagctacagtgtttgagttggagtctggctctgttgcccaggctggagtgcagtggcgcaatctcagatcactgcaacctccgtctcccaggttcaagagattctcctgcctcagcctcctgagtagctgggattacaggcatgcgcctgtaatgcccagctaattttttgtatttttagtggagacagggtttcactatgttggccaggctggtcatgaactcctgacctcaagtgatctgcccgccttggcctctcaaagtgctgggattacaggtgtgagctaccacgcccagcctggacatgaatattttaatgacaatgaaaaagaggataaagttcccctgtttctcttgtgagcagatgagggttgagggtcaagggtttagggtggtggtgttggagcaggtggctccctcgcctccctgccctgcactcacccaggaaggggaaggacgcggcgggggggcacctggatccacagccctgcagattccacaagggaagctgtgtcttcaccagcagtccaggcctcgcgtcaagtccccaaaatatgcacccgcaactgctaccaggacctaaatccagcaacagccagacgggggagggtgagatgagggccaaagtcaagggctggccctccccttcttggcctcccaccccgccaaccagtggggcccatccagaggctcctcccccagggtcagccccactctcctgtcactccccctttatccacatgcttgtttggtgagatttcctaagtccttccatcttggatgtcctgagccttccccggggactgcgaccattaggggcactttgcacctaacagggtgtatccactcggcaccgccaacaaatgttgaccagctgatagctaaaatctctcctcctctcttggactcccaccagatataactttgggaacatttgtaccccaaggacaaagggctgcgaacgtcacaggaaacctgactttccagccggccacactccatgcacaagcccagagggtctcctcagccattctgtactgggcattgctgggttttgggaattgaggatgtgaaggaagccaagacatcgcgtgctgcctgtgacctgtgggccacagcccctaaacactcagcggatcagacttggttccgtttccgaaggtggtgccagcggatgttgggaggcccggtgaactacagccaaccctcgcatggcgccgcccagctctggtaggagggactgaaataaatggagtcaagtgaacttctttggtaaaccatgatggatctctctttaggaactgcccctcaccagagctttgccacccgtgggtattaggaccctgataaagtcggcctctccagcaacgcacggagctatctcacttacaacgtgaaagtggctgtgtgttggttgccggcatgaaaaaacactttgcttaatgatttttaataaaaatcagacatggtcatggaggtgcctcatggaggaaagccctgtctcctcattaattagacaagccctcccgcccgcaggtccagcaaccagggagggtgggggctctcttcttgagaaaagtgatgcaaagccctttggatcagtgtgactgggaggacgctgctgcccaccctggcacccagggaggaggaggagagatgggagaagaggggctccctggggcaggccaagtgggagggatgtctggggggggtctcggaggaagcaggaagggttggcctctgtggctgtccagggagagagaggaggagcccaggctcccaggcagggctgaagctgggtctgttccccaggttcctgggagggtggccatctgggaagcccaggaggggaggctggaggcccaggggcccccagctactagacggccctaggaaacagacactaaatcctcattacaaggcttgttaaatgcacagacaggatattagcgtttaaacagcttctattactccagggcaaactttaaaaaacataatatttatagaaagcctcattcagctcaccctgtttgttctttatttctctggcaattaccgctaatttggagacgttctgccttggcatcttcgcctggtgccggtcaattatgaagccacccgctggtgctgcccccacacccgtcactcctgcacaagacccagcggctgcagggcttgggggagtgacatgagcccaccccctggctccctgcccttccccttcctgggcagggcaatgttcacacaccccaggccatcttcctgtgccatctgtttgtcccatcgggttggctctgggggaagtgggagggaggtgctggcccccgcagggctcccggctgaagctcccaggccccagactgcatgctgccgccctcgtgcagctctgagctgagcccagcaacgctgaggctgtaggggcagggaggtcctccgctctgggctgcagccccgtcaaccaaagagtcacactggtttccagacctatgaatgtgaccgtggtaggagacgcctctggaaagcaccctactcatgctcagacgtgtggcccctgctctgccatgccaaggacgtagcactgtcaacacgctccctctctccctccaacctcccttcctttctccatctgttccttgagtccttgccaagcctctcccctttccagggcactgctgaccgaccactcagactcatctcctgcccacacggagctcacagtcagctggtgccctgggtaagacaggcacccctggtgtgcggggactcacagaagatggaagggcagggctcagggaatagcacatagaggaataaactggtccccaaaggctgtgcatggctggacgtagcccagcaggagcgtatcccccaggcttggctctgctgtaggcagccatgccacgctgggcaccgccctctctcagcctgccctgaagcggagcacccactgcctcggtgcctgctgggcacactgccgggctcaatgtgtcctttgcttttgtccccaaggcagtgggaagccactctggcggctgtggatgctggtgcaggcatttggacgtcgtcctgagggttcctgagtagaggtcagagccagagtcaggtttaacccgatagccttgcaagcagcggacgcagggctggagctgatggtcttggggtcacccaggggtccagcacttgtcccctgcccccaagcgtcctcagcccagcgggggtcaagatgtaactgtctgggctttggagctggagaccaggttctggtcctggacatcacagttgggttggtgacctggatatgtcactgccacctctgtggccccccagctgggtggggagagcagcccagcctgtttgcctcccaggcgtaggtgaggcgagctgagacgccatctgtgaggaggctctgagagccactgtggtctctgcggtgtgtggcattcttgggacacagggtccatgtgaggaagtgtacccacctgacggaagaaggtggagaccatggggaccacggagcaggtggggaggggtctcctggctgggaccacctggagggcctggagtggagatggactggggggcaggcaggaaggaggggtggggcattgtaggagcagcttagaggtaggaccagcatgaggccagggggcaggagtgagaggagggagatgaggagcacgttgggctgagcccagtctcctgcaggaaggaaggtaccatggcccctcaggcccagagcacaggccccacggctggtgtgggcttctctgtggcagtgagcagaacccaggtggggacagggtcacatgcccacccgttctggcgtctccctgtcctgccagcaaatatccctgtcctgcttgaccgggcacagaacacgcaaacagtaattttcacccaacctgatctcactttacagatgagccacctgaggctcagagagacttggtgacttgtccagggtcatgcagctgccaagtggcagagccagatcccagagcaggcctgaggaacacgagtcccctgcccctgccattgagcccactgcccagaccccagcagcctttttacccccggcccctgtctccccaccgtggtggcagccctcctccagggggtatccccaggtgaaacatccgaaggcagagatacccccaaagcaggcagggggccccccactctgggcctctctcacagaacagcagtgacctccacacccttgctaccaaggggagcccctccccgcacggccaagctgaaagggcctgggggcaggttcctccctgcaacccactcttgctttgccaaggccaggccccttggctctgctggcaactgtccccttcacaatgagcacagaaatcattggccgcaagtttgccagctttaaaatgggagcaacaatatctccagtgctgcccttgaaaagccatgcccatgggaggtggagatatgttcactcgaggatgggagaggaggctgcacaagagtggggagccctacagagctgctgcttcaggggatacccctggccaggtcccatcctgcatctcggaacagactcattctttcaatcactcactcgttcatttcagtgttcagtgttcccagagccccagctgaacatcagacacagggcagataccaggaacaagaactgaacaagacccagccagggtgctcgagggagctgcaggcagaggggagatggaggggtgaatgggtaacaggagcacccaaggatgagggtgggggtgcagaggaggaaatggcatctggctgtggggtgctcagggagggcttcctggaggtggtgacagctaagctgcccttgactccatgcctgcagcagcccctcatgtctctgcctgaaagctcaccctgaagtcaagcaggagccagttatgggggtggggtgggaggcagggtgtttttttaggtggaacaagcccaaaggagaacacggcagatgttcagattaaccttggagcagctcagcctggctgggccacggggcttagggaggagccggaaggaggtgcggggtgaggtggagctgagagggcagggtggggagaagttagcgctctgtgttacgaaggtgagatttgatcggggcaggcggggctggggctgggcctggaagctgagtgggaagtcggggtagagggaggcaggacccactctgggagctggggtcaggtggacggtggtacccactggtgatccgcagggcaaggatggagaagccagtctgaaggaaacagcagttttcaaggctcatttttgagtgtgagtttgaggagtgtgtgggcatcaggtggacaacaggaatcgagctggcgaggctgggagggggtcctggtggggttcggacttggggggtggcagcgtttgggtgccgtctcccacactggggtgggtgacatggctcagggagggacagcaggagaggaggaggatcctcctatgggggcctggttctctgcccagctgcaaatcccagcttggaagtggagccggggatctggctcctgggaagatgagaaggagaggctccccgatcaggttccgtcccatcccaaaatagcctggaaggtccagcaaaggagcactggcccggcccccagggcttggccgagcgtggctgaggacaggcagagcccctgctggggagagggggagttctgggaggaagacccccagaggagcccggcaatcagaccctaaccagagacggaagccccctcccacctctgaaggggctcctaggccggctcacacacgccaggtcagggccgggagccgagatgcagggaggtcagggaacagggttccattctgcctgcaggctcagggaatgtctttggggaagtggtcgctgaggctggccttgaagaatgaggagggggactagtgggacacatcagggcattcttggtagaaccaaaggcctcggtgcagacatggaggccggagcacccgggcacatccttgccccaattttgccctgaatgggagcagagtcagcaaagcacagcagagctcagcccatggggtgaccagcggtgagcttgaccctcgcgattctgactcccaggggccatccgtcccttctccacggctgccatggctcctgcggcctcagcctgctctgcggaccccctgctggacccacagtccagctgcttggtgtgggccccacaggcacctgtgcggggtcaggccctcccagtggggctccagggcccttgagcccttctcctggtgatggggctggactgtggccctggagttccatgctgcagggtagattgtgtctggacccagaggtcaggctgggaaggggtacccggatgtggggttgcccctgcctgggaagtgttcctgggctgaggctgctggctgggcacaggggaaaagttcaccctacacggaaagcacaacaaattcacacagatttccaaaccacttctgcgcaagcctagaggctgatgatccggggatatgcagccttctccaaagtgtgtgcatgtgcgtgcgcgtgcacacacacacaaagacacacagacacacacacataccctaaacctttccttcttctcccagttccgcccagttgagctaggatggcccggtcctcccctcactgtgagggccccttcctgcttggcctcgcctggtactgccccttcaggcctgtctggcccagacccctaccctgatttttcatttcctttgccaaaaggcacaggggctcgcagaggaaggtgggggaggctgcagagtgggggcgcctactctccccagggcctctgcaagctgctcgtgtctgggctcagagctccggggaggtcggctggggctcacagccatgcttcaccactccttcccagggtccggtttcccacacctgattttgtttgggaagcgggaggagtaaaggcacaggataagggggaggggagcttgtggggctggggctggtgtgctgggttcctgggagccatctgaagtttgggctagtgtatcccctgccgggtattactggaggctgggcccagccccctgtcccagccccctgtcccagccccaccgtctgcatccgaggcccacctagaacagtctggccgacagccagcacttcctgtctggggacacctccaaccggcacccctgcctgctgggccctgggggaagggtggcatggcctgggaaggcacggggtgggggggtggggggagcacgctgagcttcccaacatttcagccccagatctgcccagagtgagaaagcaacacgcagtccacgcttggtacatacccaaaaatacatcatcatttcggaaccgcggctccacagcaggctcccggggaggaggggaggagacccaatcagggaagcggccgctggcggcaggttggtgggggtaggggcttggtcccccaacgctggcactcagtttagctgtcacttgcagctgtcttaggaagtgcggctctcctctctgcctcccgctcgctcctgctcactccaggtcctctctccctctccctgtgtctctgcctctcgctttatttccccaggttgctcagctccgtgcctgctctccgctcgcccatcgatggggtcctgcccggcactgccctgtcgcagtcactcctgctgcctggatctctgttcagagttgaactacagcgtcctgattccagcgctcatcaagcaggggacccaggggagggtgtgtgtgtgtgtgtgtcggggggacacaaaaccttccagcctagcagatctcacggataccggaatggggaggacactttactgaaggttagaacaattctcataaggtccctcttggcttcagagggtgggagatgagatttggaagggccagagaggtgacactgcctggagaccccagccccaagttggagcagcagggagggaggagaagcagctcctgcagaggcggggcggctctccaggcctggagcgtgggccaatcagagacgaggcgcagaagttgaatgtgcattgggtgcagcaggggtgagagggtggagtgcagggaggtggggccaccgcctgcaggagagcctgcatctaacgtctgtcctgcctcagcgttttccaggacaccccatccatgagggactccgataccttctccactaacccaccctgctgggggctaggacctttgaggactcactgccctgcagccaggatttccgctcagccctgccgaaaagccgatgccggctgagcgctgttgacagaggcctctcagccgacctgcctcgctgcccatcatctctggccagtgccacccatgggctgtatacagccagggacccaggcccagggcccggtcgggagcctgctccaccatcggcctgaaggccagagcccacccgggcggttgcctgctctttgaatagacaaaagagacttctttctatggttctcagagtttcttccaatgagcaacaatgaggcccagaggccggttagtgttggggtggctgcaggcgggtggctgcgtgaggtctcatgtgctggctctgctctcatgcttccactctttcctctggagagtgagagagtgatgcaggttggggggcctcttgtcccccttgggcctgcattggtggcctcaagggccagccctagactaaacacccaggactttccttccctggagggtaacttgggtcccccaacccaactgtgtccagctgtggtaaggtggggtccgggcgaattcatgatcgtcttcagtgagagcccacccagacccacagaggtcttcccaccctgtcactccttccatggggacctggctgagtggaaggagggctcgctgggaaggaggaggtgggggtcggtggctggagcctctggctctgctccctggctcccctccaaggccgccgcccatagctctctggctgggcaagcccaggggaggtgacaggatgcaggcagcagcatcagctttgagtctctggggctggcatggatgcctggcaggagcggggaagggtggaggtgcagatggggaggggtgcagagggcagaaatatgagttgctcatgttgcaagctctagaatgagactgcccaaaaacctccaccagccacaaacacctgagggtaggaaagcaggtgttccaccagagccgatgccatagggacctgctgcctgatttctacccgttgcctgatttctacccattgcctgatttctactgctgcttgatttctacccgcagcctgatttctacctgctgcctgatttctacctgcagcctgatttctacctgcagcctgatttctaccggcagcctgatttctagcagatctaaagccctttatggctccctggggatccaacactttgtgctagctcatgccaaggaaccagccctggccagaaggtacagaggcctaagatccatctaaaccaaacatttcccagctctgccactgccagtcttgcagcctctgtgggctgcgtcgctgctctccaccttagtgtcctcatgtctaagctgggatggcaggacaaaccctgctccagggctgtttggggaagctcctgttcttttgaaagggccagagctctggggactctgagttggcacaagcccctgcacctgagactctgagcagcattctgtagccccttgccgaggccagtgagcagccacatgtcctctcgcacgtgtccagaaagttgagctttgggctcagaaagctcacaggacgacaatgcccaccagagatggccttgagcccctcctccatgtccccccacacacagccttgtcattgcacatggactgggctgtccctgccctgggcacacaggcacctcctagagggcaggggctcagccacacttgtcatgtccagggtggccagcatggtgcagatgcccaaatgctggctgtggggctggaaagaatgaagaggtggccgggcatgggctgggttgctctttggggagcacagggtgagaaagaagcagtttcctctgtagcctgtgtcccccgggctccattctggagggtctgtgatgacagtggtgaatttctggctgcagctctggggtgtcagggtgtgggtctgccaccttttcctgcatgccctggggacctgcccatatggccagtggcttcctcaaacaagctgcctgtctcctgcatcctctaaattctggggtggccactccatcaccctcgaaaaatgggctcacaggcagggcctctgccaagttaagttccagtgtttctgctctaaaactccacaccttgagtgcacatgtggcaacagcagacagcacacacagttgcctgtgtatctgtacacacacacggtccccctacacacacacagctgcatatatctgcaaacacacacatgcacggatgccctgatacccctgcacacgcacacagctgcatgtgtatctgcacacacacacatgcatggatgcccttatccacccccctcacaaacagctgcgtatacatgcatggtcacatacacacctctgcacgcagaaccttcccctggaaatgtaccaatgtggcagccccactggggcaacccccagtgagcagaccacttccacacatgccctggaggtcttgggcttgtccctgcagatcctggcatggaaacccgaccctgcacttgggccaggctgtgacatttgccacacattctgcccacagccctcaggccagtggcgtgagacatggagaggatgcggcatcctctggtcagaacgccagcagctatgaataaataatgatgaagggagaagaaagaggggccggggtgcaggacactcccccaccgagggattctgaggcctgggcagctgtcctgggccgtcgacacattccaagctcagctgctctgtggcagtgcgccccccctacagcacagcactaaagcaaacaacactttcaataattcagcagcaggagaggggatttaggaagggaaaatccacctcagcattgacagaggggccaagaggaacaaggcaaaggtgtgtatattgggaggcaaaggtgtgtatattaggagggagggagagacagcagaagggaagatggcaagcacgatggaaggcaggcttgaatgccgcctcctgcacacctcgccagttctctgcgtgtgtcctgattgagagtctctgggcagattcttctttcccaaacagtaacatatggtggtcactgaggcattaactgccaccaagagcctccggagtcacctggcctctccccttccaggacataggaaattcctctgcagcctccccaccgcagatgcctccaaggaccaaggacagggaatccaggcagcccacccgatggctgccagctgtcatggtcaggaagttcttctttcagacagcctgaaatccatctcccccagactctcctcattgatcttagttccgccatctgaggccacaggcattgtgtggactttcccttccacaggccagcccttgagctttccaagacagatcaaccagctctttcctcctctgggcacacagcgctggtccctggggccatttcctttagggtgcatttgggtctttaccccgtcttgtccacttggctgcgaaacatcccctggcccatagctgggaactccagggtgaaactaacattccaggtggccctgcggcccagggatcccctgaggtgatccagagtggaccttacccatgccatctaaacagagtcagcttggagggcagccacttagctttggagtcatcgtccctccagcttcctggggacacaattggtttacactgtaattattaacagggctgcagtttggaggatgtgtcatctggtcactctaattgtactgaatttgtgatcagtgacagcccctgagtcttctttctcttgtactcatccaactggtgtttttggaactcagagcaagattttacatttagtcttgttacatttagtgaatttcacccctggtgctagccagctaaccaggaaaactattagttattcctctcatctttagaagaataagaatttgatcatcatgcctactaaatgtttacataaactgctggtgaaaggcatgactagcatagggttgagagcccagccttgtggcgcaccattagagacaccccaggagtcagtgccctttgaccattcacacacgtcacctatgcaaaacatgcccctgcctttccaccatccagtcttcagtgaaaggtgaccagcacgtacacagcccacatggcttgcacagtcaacctctctccctctttggaaagttcggctgtctcccaatctcaagcttcctccctgggcatctctcgctggccagtcccctccccagcactgctgtcccctccctccattcttttttttttttttttttagacagggtctcactctgttgctcaggctggaatgcagtggcaccatttggactcaccgcaacctccacctcccgggttcaagcgattctcatgtctcagcctcccgcatagctgggattacaagcatgcaccaacacacctggctaattttagtatttttagtagagacgggatttcaccatgttgcccaggctggtctcaaactcctgacctcaagtgatgtgcccacctcagcctcccaaagtgctgggattaaaggcatgagccatgtgcccagcccccggatcaattctgtaagtgctcagctgctggattgactctggaactcctcacagccaaggggagcgtgtgtccatgcctcgaggacccacagaccccagctgggtagggggctgctgggcagagccggagggggtactgggtcccttctgcctcagcagcaagtccacaaatgtgtgtgaggtgccaactgcaggctgggcccattccacaccagggacccagctttgaaccaaacaggttaaccttcctgcactcctgggctttaccccgtactggggaggagagtcaacaaacataatttagaaaattgtcttgcatgtcaaagggcgacagtggtgggggaagcaggatgggggtgtgggagggcagaggagggggctgcagtgttcagccaggtggtcagagtaagtgtaattgatgaggtgatgttcaggcccatctggataggcccaaagagggggctctgaggctttctggggagaatattccagcaaaaagaatatccctggcaaagggcattccacatcatgggatatgtctagctatttggggaaccagcaaggtggcccatgggctggagtaatgagagtgggcaggcagcagtgggagaagtggtcagatcataggaggtcctatatgggagggtattgtgaggactttggcctttctccaagagaagtgggagtcacaggaggatttggagcagaggaggagtgcagcccaacttgggctttaaccgtattagcgtcaccccaacagcacattccctggataggaagtgggccaggtgtctaaagatggacctcatgaccatctttgctcagcctgaggattttgtaatggttggtattcacggggaggtggggatggcttcctggcctgatgagcagtcacctgcctgctatgcttcccaccgtggtcaagagaacgcatggggtctgtgactgcacccagtgtgtcctgggcatcaccctgtggagcaggaggagcctgggatgtggcaaaactcagacctgagctcaaattccagaccagccactgtcctgctgggcagctttgagcagattacttaacctttctgagcctctgttccctttttggtagagtggggatggcaacatctaccttcctggggtgactatgggggtttagcagtcaccaaggtggagggtctggcacacaggtattggataaaaaatatcacattaatcaagggacatgggcatttgcaggtatgtgagttaggaaagagggagcgtgaggctggcaaatttctacaccagcgtgagactggataaggacagactccagctctgacaagttgctcgggaggctctgggacctgccaggcctgggggaacccactaagcattctgggcagggacctctcactctggcctgcgcggagcatctgcagaagcagcagaaggctgcggtgcctccaaccccgccttgctcccctttctcactcccgtgtctcttccctccctccttccctctccctctaacttatctgcaagcgccagccagttggcaggctggacactcagcaaaggagccatggagacttcttgctggttttggccgagaccaccagttttgtgtgttgagtccccagaggcgaattccagcagaggagggacaaagtaagtcctgagaggtccagcgaagcagcgagccagagaacatccacagaggcaggttgggcctcagtttcggagtggtttccccttttcctcctgggctggtgtcctttgatcccatggaccagatggaggtgtccccatggatgtcagaaatccagcccacccctaagagggggtgagtattgtttgagcatcagctcgtccagggcaggggctttgtttggctccttgttgcatctcaagcatgtcatttgtgctcactgcacaggagatgagcaggtctctgatgccagtgggggactctgccatagagaaggattcagcacagggccccgctcattcccggctggctgggggatggcggcgtggggaggctgactggcggcggttactcactcttccatggcttataactggagcacatgtgatggccaagaggcaaaaagcaaagtgcccaggaagaccctgaccagcctgagggatgcaggcaggtggcctcagtgtccaggtgagggtgggagaaatccaggggcaggggaaggtaggctcggggcctctgtgttggtttttccttctgagctggtaatgccaaggccagcgaggtcctgaattgtagccatcacattgcatggacctccactttgcttagtggggagcagataggtactgcagctttttagccaccaacagcgataaaacccaccttctttgtggacctccccctacgaatcctctggagagacaaggggccctgcggtcagcgtcaatgtaaggcctgcagggtcagaaggacccaggtgtgggcagccaggctggccagggacgcatgtcttccctgcccttcctccgtaggacggagcctggcctgctcctccttctaagctgcttacaggtctctctcgtcacctgttctgtcttaagtgggattgtgtcaagacctcactatctcgcctctcctccctggcgctatccgtgggctctccgtgttccctccggcctgtgccttggcaaagctgtccgctccggagcgggcggggtggccatgaagcctgagagagaggtgtgtgtcctgctctctgcaccgtgacgcctcccgctccctgaaaaccagggagaaattactctgcccaagcggaacacgcccggacaagcctcctctccagctgtaattaatactctggggaaaacacagacttggggttttcatacttccacacaaacacacacacactcacagatttctttccattgtcctccgatcccatctcaaatgtttaatgtcctgcttctttcatgggtagcacaaaaccacccaactggatacatccagaaagccaagggaggcaccagggaccctcttcaggttccgtgatgcagaacttgagcgtttgggagctgatttgccaacaagcagtgcccaggctgcatccctgacgtggagcaaagcagctttggccttctcagagtcagaaatagccgtgagtttgggttaaccctttgtggtcaacattctggggcattgctctttatttcccccatcacagtagcctaactgatgcgctagtccaaacacgtgtgcgcataccaagcgctcctgccacctgactcattacaaaacactctggtgaggcaggagccttgcagttccatgaagctaggcagctggcaactctgatattggaaatgttctctcaaaggacaggagagggccgggcgcagtggctcatgcctgtaatcccagcactttgggaggccgagatgggcggatcacttgaggtcaggagttcaagaccagctggccaatatggtgaaatcccatctctactaaaaatacaaaaaaagtagccaggcgtggtggcatacgcctgtaatcccagctacttgggaggctgaggcaggagaatggcttgagcacggtaggcagaggttgcagtgagccgagactgtgccatcgcactccagcctgggtgacagtgtgaatgagactctgtcaaaaaaaaaaaaaaaaaaaaaaaaaaaaaaaaaaaaagggacagggctgggcgtggtggctcacatctgtaatcccagcactttgggaggccgaggagggcagatcacttgaggtcaggagtttgacaccagcctgaccaacatggtgaaacaccatctctactaaaaatacaaaaaaattagccaagtgtggtggtgcacatctgcaatcccagctactcaagaggctgaagcaggataattgcttgaacctgggaggcagaggttacagtgagctgagatggtgccactacactccaacctgggtgacagagcaagactccatctcaaaaaaaaaaaaaaaaaaaaaaaagacaggagagctcaagtgggccaggaagggtggagtcctctgcatctcccactggtcagagagctcctttggggtggcatgaggaggtggggatgggaatgggctcagaaatccaaacccgtgaaatccacagtctcctacagggaggcttgacttctccagggaaattctcagtgtgaaaagtagcctgaacaaccaggactgtggtcttgccttggccacttccaacgtgggcctgggtgaataatcgacccatcctaagcctcagtttcctcatctgtagaatagggacaccattcctgccttttgaacaggcctgttgtacggatgacatgggacggcaggtttcacttgtgatgacctgtgtccaagctcctaatcagctggagatgctgtgcccagataaaggattgggtatgtccgactcagctgaggcaggtgcagggaccatgatttggaagaccaaacaggctcagcttctcatgggtcctcctcagctattctcactgggggcaaggggggtgccgcccagaggcacagtgacacgcagtgatgatgaggctggttgggttgccgtcggcctctaggttcccttctccccagttttctcatgttcctcaccacccagtctttgagaggcttggaggcattgtttttctctcactttctctccatatttatttatttatttttttgagatggagtcttgctttgtcacccaggctggagtgcagtggtacgatcttggctcactgctacctctgcctcctgggttcaagcgattctcctgcttcagcctccagagtagctgggactacagtcacccgccaccatacccggctaattttttgtatttttagtagagatggggtttcaccatgttggccaggctggtctcgatctgctgacctcgtgatccgcccgcctcggcctcccaaagtgctgggattacaggggtgagccacggcacccggctctccttattctttacaatcaaaatgttcctgagaagaaacgctgtgaagcagtcttgctaagcctttccagagctaagttccggctcctgcagagccctcatcattgaggagaggaggctgttctcaaggcatgggaagcaaaggtgcctgtctctacactaggactgtgtgtcccaggctcacgagtgcttctgacagccctgtagctcgtctccttccaccctgcaggggactggggacaagggccaggcccagcctgtgtatgtgcctgggtttgttccagcagccgggcagttactgcagagacagatccggtgtaaagaagaaaacagttctgcttctggtcaagatggagaaatggggactgatgtgcctgcctccgagaacaataacaacaagctgaagactagttttcaagacactggacgagatacagtgaagggcagtgatcccccagtgctggtcatagaggagctgcacagtcgtcccagctgactgtcttgaggaagttttcaggccatggtgcagtgaccccaggtcaagcctggtgtactccctgagttgaggagacagagctgagaggtggggagccaaggtggctggagttataagacagagcaatggggagaagacagctggacagagaaagagctctacagatactaagagggtcccactgagtactcagctgagtactgatcagcacaagctttggagaaaaccacccaaggttgaggcgagaaccccctggagggatgaaggacacagcactgggcaccctcacagggccagagtagctcagtcctcactagtcagattggaacaggaactttttactgttcatggggcactgggtagagcatgcagagccctgccttagtagcaagaacaatcacacctaggataaatacagccctgggcatatcagggctgtatttattgtagaagaaaactgcctttgttaacataatcatttatatagaaaatctgacggaattgacacaaaatctactagaactagtaaatagatttagcaaggctgcaggacacaaaatcaatgtacaaaaaatctattttatttctatacgctagcaacaatcaatcagaaattgaaagaaaaataccattttaagaagcattaaaatatgaatgacattggcataaatctaagaaaagatgttcaatatccatacacagaaaaccataaaccattgatgaaattaaagaaattctaaataaatggagagaaataccttgtttatgagtcagaaggcccagtattgttaagatgtcactgatcgctgtattagtccattctcatgctgctatgaagaaatacccaagactgagtaatttataaaggaaagaggtttagttgactcacagttccacatggccggggaggcctcaagaaacttacaatcagggcggaagacacctcttcacagggcggcaggagacagaatgagcgcaagcagggaaataccagacgcttacaaaaccatcagatctcgtgagactcacccattatcacgagaacagcatggaggaaaccacccccatggtccaattacctccacctggccctgcctttgacacatggggattacaattcgaggtgagatgggcatatcaatccctcaaactgacttatagattcaattcaatcccgatcaaaatcccagcaggcatttttttttcttagaaatttacacactaattctaaaattcatatagaaatgtaaggggcctagaagagccaatataactttgaaaaagaaggacaaagaacaggaagattacctggtttcaagacttactaggaagccataacaatcactgtaatagctgtggtaggactggcatcaagacaggccaacagatccaagaaacagaatatcaaacccagacatagactcacatacacatgacaactgatttttgataagactgcagggacaattcaatgggggaaaggatgatctttttaataagtaataatgaaatcattggacatccatatggagaaaaataaacctcaatctatagcttgccccatgcacaaaagctaatttgagataaatcgtggaactaaatgtaaaacctgaaactatagaagatctagaagaaagcataggcgaaaaaaaatctctttactttttagcaaagaagacataataaatgccaaataaccatacgaatagattctcaacatcattagtcactagggaaatatagattaaaaccccagtgagctaccgctacatacctagtcaaatggctaaagttatgaagactgacaacaccaagggttgcggaggctgaagaactgcaattctcacccacgactggtgggaatgtaaagtcgtgcaaccactttggaaaaccgtttggcacttatttagggcgttaaaatatacttaccttgagatccagccatttcacccaagagaaaacaaagaatatgtccatgcacagacttgcacacacatattcacagcagctttatttgtaacagccccagactggaaacagcccaaatgtccttcaaggaatgaatgagtcagcgctttgtagctcaatcccagcgtggaatactacttggccagaacaaggagaaaagtatatctatgtccaacatcacagaggaacctctgaataactatgaggagtgaaagaagccaagcaaaaaatgaccacagatgctacgattctatttatataaaactccagaaaatatacatattctacagcgacaagaagcagagtcagtgcttgccttggaagaggggattgggtggggtgtgaggaagagattacaaagaggcacaatgtaatggttgggggtgatgaatacatccattatcttgattgtggtgatggtgtcatgggtatacatatatatcaaagcttatcaaattgcatactctctgtgatgtttatcatacccccaatgtacttcaataaaactatttaaaaaaccaacgtgcaaaaatccaagtttacgggaccaggcaaatgactgcattcttacatagagtgcaaatggattcctttttttttttttagacggagttttgctctgttgcccaggctggagtaagtggtgcaatctcggctcactgcaacctctgcctcccgggttcaagtgattctcgtgcctcagcctcccatgtagctgggattataggtgcctgtcaccatgcccggctaatttttgtatttttagtagagacggggtttcactacattggccaggctggtcttgaactcctgacctcaggtgatacgcccgccttggcctcccaaagtgctgggattacaggcgtgagccaccgcgcccggcccggcaaatgaattctttattctacaagtgactcacctgggggctccttccgatgcttccctgtaaaatagattcagtttacagcggtggcatctcaggaggcggctgtgacggctgctgccctcctcgtggtgaacacttgcgggcgcctgtgaggccaacacccggcggccttcctgtctactcccacggaaaactgcatctaaccctgacacacacaggcagccactcggtacgggggaccctgttacacacggcccactgtgggaagcctgaggccatgtgaaggggaccccctgggctctgtctctttgtcctcttcctgctagaaagccggagagccggcagcagagcccgagctgcctctgcccgcagccctgagtggctccgaggtgacctgcttctaggacggaagcacccggctcaggtctagcccaggtctagttctaatgtcaggtctagctccaggccatctggtcagtgcccacttctgagccaagggcgggcttagggcaaacgcggtacaaaaaagagtgcccaacttttctagttttggctgaagaagacttcatacgctgacggatctagtttccggtcctgatttttgaaaaacgcagcgctggccttgtgcacacaccacccaaaacccaggacctagcgaagagaggccacctgagggccgatggctgcattttctaattttgttcacactaaatatacattacagatgatctccaacttacgaaggtttgacttacgattgactttgaatttttcaactttatgtttgttgggtttattgggggcattaagtgctttttttttttttttttttttttttttttgagatggagtcttgctctgttgaccaggctggagtgcagtggtgtgatctcagctcatgcaacctccgcctcccgggttcaagtgattctcctgcctcggcctaccagtagctgggactacaggcacccgccaccatgcccggctaatttttgtattttttagtagagatagggtttcgccatgttggccaggctggtcttgaactcctgacctcaggtgatctgcccaccttggcctcccaaaatgttgagattacaagcatgagccaccaagcccggtccattaaatttatttttgacttacaatattttcaccttatgatgggtttatcaggacacaaccccattgaaggtccagaagcatcatacttgtataataatctccccaaagtaaactctgcaagtgaatctgtggagggggtcagccacaggtgggtaatgggggttggaggtacagagcaatggaccaatgggctcaggcagtagtagccagtcccccagcgagggtcaacactgggaactgagctggtatccgaagccccttccccgaggagaccaggccatggagatgagttggaccaccctggaccagcaagctggggctgcctgaggaatgggtggccatgcgcggagcacctggggtgggggaccttggggttgggggagggaaaggatcaggaaggcagtgacattgcttctcaggccagccagaattgcctaaaaacaatcgtcctccatccttaccccatttatccatttccctttcagcccctccggctcccagtcctgcctttcccagcacattttgggctcatccatgggggacaagagagaacacgacacagaggtgctaaacggcgccaagccttccctccacagcccccaaactcttcctccctccagtggctgggaaaccccagaaactcctggctttcattatcagcagctcccaagatgttcaacatgctcatatctgtcaaaaactattcaggaaaaatagagaaagtctttataccttttattcagccaattttccccgaggcactctgggctctctaagaaaagaaaaagagagaaaggagagagaatcacaatcaatgttgtcatcatgcatctggttgctggcgatgctatttgctcatcgactagggaagtctggaggtggaagcatcatctccctgggagtccaaggaaacctgcctgggttaacctctggctgccgtctgcatctcaagcatggctgggaggcggcggttagataacaggcagagataaagcaaaacagggcacggtggaccggccacccagaggtttcagactcattttctctgcgactctggatgttcctttttttcccccacctcaaactccaagcactccccagcctggtttgaggttgtccacaaacgcaggccttgtggcttgttgatggtgacgtttagtttcacactgggtttcctctgccatgccgtggggatttgcttcctcctccaggtgtagggcgggggtcactttgagtgtggtcatggcatgcacattcattttatttatttatttgtttttggagatggagtctcgctctgtctggaatgcaatggtgcgatcttggctcactgcaacctccgcctcctgggttcgagcgattcttgtgcctcagccgccctagtagctgggagtacaggtgtgtgccaccccgcccagctaattttttgtatttttagtagagacgggggtctcgccatgttgcccagggtggtctcaacctcctgagctcgggcaatccacccaccttgccctgcacattcattttatgttattaaagaaaagttatttaacaaattctaaatcccaccaaacacataattatagaggcaatcgttgtatgttattgtgaatcaggtgcacctaccagcagcaggaacagctcagtgatacggacagactggcaaggaccaccactcactcactttataatccagggcccggggccagggtatccactcctgcctaagtcacaaagctagctcactggggcctgggactccacacgagtgcctggagaccttccttttcttagtaggtcattgaggagttcagaaacaaaggggtgtgtgtatagtgtgctttaaacaaacttagatttccttcctttattttagtaatgtttcataattttctgtgtacatgacttgcacattttttaattgtggtaaaatatacataatatacaatttacaattttaaccattttcaaatgtacaattcagtggtattgagtgcattcacactgctgtcaatcactgctgctctctgatgcctgaaccttttcgttgctccaaaaagaatatccatacctgttaagatgccactccctgcccccagcctcctgtgcatatgtgtatgtgtgcgtattttttaaaacttagtgcaaaaaataaaagcaagtgaaaagcttctggaattgaaagacggtcagactgggcctctttcttcagatctagaaaaatcaccaccaccgtcttcatccacatcactgtaaaaaggttactgcggtcgtttagtttgcatggtttatgagccaggcaccgcctgtacattgcttcattcagccctcccaacagctctagcaggcaggtacacttcttactcttcccattcttcagataaagaaaccaaggccccagctggtgaagcgactgtggccacagtaactgagtcagctggcccgtcccccagagcaggttaccccatctgcctgtctcacccacaggtggaaagaagtaccccgccctgtgggaggcgagaatgaacgtggccacagaacaccaaaatgcacagggcctgccttccctgctggagtttgtgcagatcacagtggcagtattgggtacttcataggcgggcccctcccagccgcatcagggagggctatgggccaaggagcagctgaacttgaactgggcactgggctggccatttccaaggtggccctgtggagcccctgttctcctccccagtaaaatggcaaaggtaacttctggcccgtggagccatctccacacacagctcacaaaatgacgctgagaagggcaggtgtgattggaaggcactgccagtgagagtcacttcgaaaggaaatgtgtcatctgagcggcttgcatcaactgctgccttcgttaatttgggggatttttttctatttttgagacagactctcgctctgttgcccaggctggagtgcaatggtgcaatctcagctccctgcaacctctgcctctcaggttcaagcgattctcctgcctcagcctccgaagtagctgggattacaggcatgtgccaccacacctggctaatttttgtatttttggtagagatggggtttcaccatgttggtcaggctggtcttgaacacctgacctcaggtgatccacctgcctcggcctcccagagtgctgggattacaggtgtgagccaccacacccagctggattttcttattggtgatttcttttcttgaagtgagttcttcttccaattcaatacaatttgattcaattgaatccagccccactgaacaaacacacagccaggcatttggatctgaagccaggtccagagccttggaagggtacgtctgtggctctgctggaggcaggctcgggcccatgggctgagaaggtgaagcaggactaagccaaagattcagggcttcacctctcttcccgaacacctccgtgtcccctgtcccttctcctctactggcccaggctctatgcccaagcccttagaagtcctcccagcacagtaactcctttcggctctggaattcccagtctttaggccacatcagcccagatgggagctggcagagtagcctgttcaccccaccccatccaacccagcttctctgcctctgccaacccttctctcctgagagattgctggcatttcttgagttctcttaaatgtgtcacacacgtacgagtgtctttatttagtcaaggtgaaatatgtcctacctgcactgtgtgaacccggggttgcagtggcatctggaggcccaggggctgagccacatttcaatcaccaaagagtccccatttttgaaagctccagaactagagggatggtcaaagagccggtcgagcctgatgcctcaaccacagggtccaatctgttttcctggttcttcgggccaggagctccccgagcccagcttcgtcctccatcgtttcacagaacctccagggtcacgaaattccctgcacctccccggaggctcttgtgcatggaaaggaaggtggtctctgtgcagagcagcccacaatttgggagcaaccaactccagtggtggcctggttgcccatccctgggatggtgcctcgcttcgtgtttctgagatgtcggctccccctcctcttctgcactcccagcattttctatgtctctggtccttgccccacctacccaatcctgggggcgggggaaggagagaggccccccaggttcattcccattccatgggccttttggatgacatcccacgggcgtgctcccagggtcatgaaacacggagctgattctcagcctcactgttagcaaacactgctctcagccactcagcgggataatcaattatggtaatttttgcctccatgaatcaggttcatggaggaacacagggatcagcacagtggtgccgacttccccaagtgcacatgcagtcacacccttcagcaaagcccagacagagcaagacccgcctgccaggctcaaattgtctccacactcccagagtccactccacactgcccactgcccccaggagacggcggggcactgcacaactccacactcttcctgggggagcagggagggctgtggttggggtgagtgcccaatgtggagcccctggtctgctttcccactagactgtgatgcccccatgggcagaggccatatcttagaggtcctggtgtccccagacactggtgtggggccaccatggaccagaggcagtggatgtttgctgaatgaatgaacaagggaatgaaattgtaacaggtaagggtttgactccagaggtcagagctggacccctgttttgaagcatgggattggacactttgagaataatatttgctcttggggaatcccagccacggatgtgcatttatccacctggagaggccttttctcatgttctccctttctgtcctgtctctcctttaggccccttgattccacctggctcacagttcaacttcccaccttcgcactagtccctccaaagacgagttccttgtgggcttttccctgcaattctcctcaaggacatgtgattctgtctttattgaactccatccaaatgacggaagtctcccacctcccaaagcctttaaccctagctgtcttctgtccataaaacatttcattcttcagaaattaaactggggcttgcttgtgtggcccttgaaatgaaaagcacatgtgttccttagtaaaactcatcgttagtggatcatgcaagacaactggccagaaaaaaaccgctcatgtcaaaatcagaccactcccactcattggtggcccttcagcttagctgtcacacatacatcccttctctcccaagatagatgcaagttacttgattatggggaaggtctagaaaggcacagagcaagcggaacgtggatttctgcatggatgtgtccccagctctttgataaagtcaatttcttagcagtggccatcatgtctcttatttattgagcatctactgtgtcaggcactgaatatacatcattgacctcacgtcagccccattagggacacattcctacccttgataccaagatgagagaaaggatactctgatgtttctcctggtctgtttcactttatttttaaaattgttctttttatttttttgagatgcagtcttgctctgtcacccaggctggagtgcagtggcacaatctcagctcactgcaagctccgcctcccagattcacgccattctcctgcctcagccttccaagtagctgggactacaggcacccgccaccacacccagctaatttttttgtatttttagtagagatggggtttcaccatgttagccaggatagtcttgatctcctgacctcgtgatccacccacctcggcctcccaaagtgctgggattacaggcatgagccactgcgcctggcctaaatttttcaattaaaaaaaaattttttttgagcaggatcttgctctgttgctcaggctggagtgcagtggcacaatcatagctcactgcagcctccatctcctgagtttaagtcaccttcccaccttagcctcccaagtagctgagactacaggcaagcaccaacatgcctggttatctatctagctatctatctgtctatctatttaatctttttttttttttttagtagagatgggaggtctcagtatgttgcccaggttggtcttgaactcctggcctcaagtgagcctcccacttcggccttccaatgtgctggggctacaggtgtgaaccatggcatccggcctgtttcgctttaagtttgagccctctgcgtaacaccatcctgcacttctggggaggtgatatgtggagattccatcattttgggacatctcttcttaactccattggcaaggacaactgaatcagccacagatgatggctgggaagaggggcaaggaaaaatggggcctgtcctggtgccagggttcaggggagcacaactaactgatgttgacgtggaaggtgctgaggaaggtgactctgtgctgaggaaggttccactgtgaccacgtggaactgtttgtgcgggaggaagcttgactgtctgaagcagggagatggtttttgtcactttggctgccatgataataccatagactgccggcttaaacaacagaaatgtatttctcccagttctggaggctggaagtctgtgattagggagcagtgtggtcaggcgctggtgagggctcttgtcctggcttgcagacagccgccttctcactgtgtcttcacatggcaaggagacagcgtgaaagcagtctccctggtgtctgttcttgtaagggcactaatcccattgcccaagggaccctccctcatgacctcatctaaccctaatcacctcccaaaggtcccatctccagatatcatcccttagggagttagggcttccatataggaattttggggagtgaccgacatttagtgcagcacacacagcttccacgtattcactcgattctttgctttctttccttccatgttttcctaaatgtgcagtgacggtgcttggacctagtttatggtcagagtagatttatttggcattgtacgagttcctgcagcagaggcactggtgccaggaaagaccttgggagctctggttcccagcgtgctgctgctgctggtggagggggtgctacctgaggagccccggggtggggggcaggccgtatggagggtcctcgaggcagctttgagaaactcccagtgcaccactctcttgtgttacttcagattttatgaaacgatctgtttgtgctctttccctaaggggagctggaggtgaagggtgcaattttataaatcactataaaattataaaattttttataaattataaaaaatcaactgtgggtggcttaaacctggcttgtgatgacggtgatcagagcaggagagccacatctatttaatgtgatgttttcctccttcttctgaatagaaatttgcctttagagaggaaaggaggggagagaagaggagaggggagggaaggggaagggagcatagggcaggagagggcaggggagggaatctggcttatggctctgagccataaactgtcaccattagggagaccggggagttctggcaggttctggccatcacagtagtccctggagtggctttgggttctgagcacactgcccatacttaggtctgtgggaagggccacccccttactgggcctccacagggcagcagggcagggcttaggggttatacgccgtgctcagagcagttttgcctcctctcccaggaagcccgggcagggctccacagcaacctgcctggagtcccaccttcaaggtccttctaggcactctaggccttcagctgtgctccagtggggccttactcctcctctgcctgcgtggacactgctgtgggccccgtgacagcagcatgcatgcctagcacttgctgaatgtatgccaggctacctgctggggactgtgtttttctggggttatgccattgatgatgtcatttcagctttacaaccaccctagggggcaggtactatgatcacttccagtttccaaacatcaaatctgaagcttggggaagtgaagcagattgccctaaatgccacagctggtagcggttgcagctgagtttgcgcgagacccacctgaccacaaccttgtgcttagagctgattattctgctcaggccaagcactcccggataaaccctggagtgtcagagtgagcagggggcaaaccaacgtggccccaggagaaaacccactgtactccttttgctcattgccgggtctaactccaacctgcctcccaccccagcacttgtgcagcctcaacgcccaacatcagcccaaaccttctgtgaccagttgactcttccagctgtgctgggctttgcaaagcccatgtgcctttgccctggggtgtcatttgggactgtggagtcgaccacagtcaattgcttgggtgatatattagaggttctgtctggtgggatgaggtctgcaggcacctggctgccctcaggtgggagggtgtggggaaggtgctggctttgcatgagcggaacttagcgcacacctgtggactgaactgaactcactggcccacccctgagcacccttgacaacacccaagctgtgccacagacaccatagtgtatcctccacctgtccctgggtcagccaggctcagaaacagaagcccagagaaggaattttgccaaggttgacacagcttccaaagggcagagccaagacaagaaggcgcaatgccaccaagcagatggcagtggaggagacagagaccccactgaggatgcagaaatggcctgcggtcccagaggtagggggcaggtgggaggcccagtgtggcatctctgccctggagcatctccagacaggcaagtttcaggggccagagcccagcactgggtcatctcaacaatccatagacaccctcggccttccacacatgaaggagataccaccgcacagggcagaatggtgtccccagagtccatgtccatccggaaccttatttggaaacaggttctttgcaaatgtaattagtgaagatgaggtcatagtggaacagactgggccctacatccaatgcccggggtcctcatcagttgaggagaggacacagagagacacgcattgggtgagggtgtgtgaggatggaggcggagattggagtgatgtagccacaggctagggcgcgctgaaaactgccaggagacttgaaaggacaaggaaggaacctgcccagaactttcagacagcagggccctgagacacctgcattccagacctcaaggctccatctccagagcagtaagagaataaacttctgttgtatgaagcctcccagtttgtggtcatctgttacggcagccacaggagagtaacccacccaccctccccaccttcagggcagtgccagcgagggctgcgggcgcacagtgggcctggttttcaccccctgcctgcaccctactcactctgggcttgctgggcctggttcccagagcatggtggccctttcttcacggtcattgctcttccacgacttctccatgatgttattcctgaccacacaaacactgtcacaggtgcccctcctagagccttcccttcccttcccttttctttcctctttcttctcccattcctttccttccttccttccttttcttccttccttcctttattctccttccttccttccttccccctctcctttatccctttccttccttcttttccttccttctttcattctccttcctttcctttcccttccctttccttccctccctccatccctccctcctttccttccttcctctcttctttctcccattccttccttttttcttttccttctttcattctccttccctttccctccctcccttccttcctcccttttcttttctttccctccttccttctttctttctccctcccctccccttccctcctctccctttccttttctctttttgtttttcttttctttttgagacagagtctcactctgttgctcaggctggagtgcagggccatcttggctatctgcaaactccgcctctcaggctcaagtgatcctcccacctcagcctcccaagtagctgggtctacaggcgtacgccaccacacccggctcatttttgggtttcaccttgttgtccaggctggtttggaactcctaatggggcacactagagggacctagaggccacatgccacggtggcctcacacaattggaccccgagaaagaccgttcagaccaaaggaccccaggaaaatggtttttcctttgatgtttatttggaagccacttttttggtttgaattttttgtggtaaaatgcccataatataaagtgtaccattttaaccatctttaggtgcacagttcagtggcatgaagcacctcacactgttcacccattcccaccgctcaccccctcagtcctttgtgaggctgagtgatattccattatatggatacaccacattttgtttatccattcgtctgtaggtgaacatttggatttttttttttttttttttgagacacctaactctgtcgcccaggctggagtgcagtggcgtgatctcagcccattgcaacctccacctcctgggttcaagcgattcttctgcttcagcctcccgtgtagctgggattacagatgtacaccaccatgactggctaatttttgtattttagtagagacggggtttcaccatgttgcccaggctggtctcgaacttctgagctcaggctatccactcaccttgacctccaaagtgctgggattccagacatgagccaccacgcccagcagaacattttggattttaatccactttttaagacaatgagaatcacgtcattggccccatttcccattttgcttcagccacgagcatgtcagaaaaaaaaaaaattgttgctcaaccttactggttgtatcaaaaagccccactgcctcattttcctgccctctctgtcttccattgtctgaccttgacttttatctgctgacgtgcttccgtctgattttatgtggctatggcaatggaaaaccatctatagaatgacatggacacaagctgaaacgaccctgcctcaggtcattctccaagtcctccctgatgccacagggggctgtgtgcctccgggagagccaccttccctccctgccttgcagccaggcacagggcacagcactgcatgagaggaacagtcccgcccccgactgctcgtggactgtgggccttggacacctttgggcttccagatttcttggtcacctcctcttgctggtgtctgattacgctgagtgggctgttcttccttctactgtgaacctaagggaagcggagtccctgtctgagctgctctctccggagctggcgctgcacgccatattccctccaacactcagctgagacagagttcagcaatgatggtgtccagatggccgtccagtccccacttggctgctgtctgctgcacctgtccccctgctcccgggtgtggagagccagcctgcctatgttcacaggcacagccgggatgtctctcctatgctggtgagatctcaagacccatccgacatcccttggagagatggaaactctttgagacctgaagaggcaccacctctctgcagagagggatgtggctggaccgaggacgcggcctcccagcagaagtgttgcaggggatgctgggtttggtcctgcccatgtgtggctgtgagcagtgccaatgggatgggggtggggggagaacggcggagacaggaaaaggagccgagttaatacacagggcagacggcaccactcagcacgcaggcagctggagaacgccggcttcttagatgagcgcgtttcattatcaacaatttagacatgtcctttctcctttgggagatgggcaaaatctcatttcctgagcaaatcccctaagaaaccaacctattcattcctctaagattttcagaaatccgtctccatcaacctacttacaaaataaaagtagctaataggccaagtgtgctggaggctggctgctagaatggctggtctgtggagcccacgggagccagccggaggtcctaaaaatgcctaggatgaaaggtgggagatacagccagctcatctccccaccctggctggcttcggtaatgccacaggtagacacacacagagaacataatcgtattttttttttttttttttttgagacagagtctcactctgtcacccaggctggagtgcagtggcaccatcttggctcacagtaaccgctgcctcccaggttcaaatggttttcctgtctcagcctcccgagtagctgggattacaggtgtgcacaccaagcctgggtaatttttgtattttgggtagagacagggtttcaccatgttgcccaggctggtcttgaacttttgacctcaagtgatccgcccaccttggcctcccaaaatgctaggattacaggagtgagccaccgcatctggcccccatgttgttttaatttaaggcaacaactagataagcatttgtagaattagagaaaagcaatgcagagttttgcatctggggaaaaatcacagggtggggcatctccactcttccagctccagagaagagaaggcaaggcaggaccctggctgtgcttggaacttagatctggcggttgatccatgttctgagtcaagctgggatggttggtaaacctcccatgggttactcaacatcgaagtgcctcagtttactcccctgtaaaagcgggggtgacagtaggacccacctctaggtatagggatgaaaggcagcccaacccttagcacagtgcctggcccacaatgggaggaaacagagccacccttagcacagtgcctggcccacaatgggaggaaacagagccaccagaggcagtcacagcaggagctgctcagggctgcagtgagctccggtggggagaccctgggctgtgggtttcacccaaacagggcgaaggggcggggctctcctctacctccggggcacaggagagggagggacgtttggaacaaaccccaagaagacttctgcacctcttggacccaagtgatgaaaaggctggtggctttgttttgtgtgtgtgtgttttttttttggagatggagtcttgctctgtcccctgggctggagtgcagtggcgcaatcttggctcactgcaacctccactcccgggttcacgccattctcctgcctcagcctcccgagtagctgggactacaggcgcccgtcaagggctggtggctttgaagtgattaaaagccaggtgtctgtccctggaagggtggggggtcttagagactttggtgggattcacttgcaccaagatgccttctacccgggaggaggctcaaacctgaatgaatgcaacgtcatttccacgtgttaaactgcactccccaacctaagctagtttccctgggaggtaacgatttttgaaacaaaaccaagagtagctcccatgggcaactgtgggcctgtgcttggtgtcccccacagtgacggccggagtgctttgcacatctcctccagaggattctcaccccacaaccctatcggggggtgcttgtatccctaggcacaggtaaggagctgaggcaatgggggtccccgttgactcactctctttggggactgaggctggcagggagtgttgggtgttgccacgcagagccactcagcatccagcctcacttaccagcaagctccagctccgcagagattctccttcttggaggcctcagagctctgcagctcagcgggcagctggaggcccacatccactgcctcttctgtgggagggcccccgcctgccactcgccaagcccccattctgagctgggacctgcctccatcggctgggatgcggtgcggtcttccgccagcggggccagaacccagagcgaggctgcctcccctgggtcggcaacgccacctcgcttcctgcagctgacaaaggactcctgaggccactaacccttccaagccctgcaaaaccatctctggaaccaccctgaagctagggactcggctcaggaactgctgcttgctggggcgtcgaaagccaagcgcgctcaggtcttcaaagccaccgtttgtgcttgggctgcggattctggctagtgagatgctgagctgtgaacaaagtcagagtccactcataaccacctccctctgttccctgtgtctcggcccgctcggctccaatgctgctgcagtcaccgtcttttattccctgtattctgatgctttgacatctgaagccttgctggccctggggagacggctcctcccaaagtagcagattccgagaggcagcaaacaacgggcttggggtgtgctttttcacctgcaaaccggccaaccagatcccacaccccaagcccctgcctctatcggggtcccatgctcccggagactgtttacctgtcctaatcaccccagagccaggtacagacaatcagatccagccccatagcccagagctcactgaaatgatccaaaccagccagccccaaaaccacttcccctgcctcgcccgttccttcctagggaaaccacagtcaagacccctgcccctgtgaacccccattccctctgcctcccgaccaaacctggtacctccctgtgtgtccctgatgccgagttccctgtctctagggatctgtccctagataggcttcttctgccatgccagtcatttctgtatctgtgtgtcttttttaccccattaaaacaaattccaggtatccttagatccccaccagcctcaccatcctagctgcacctgccggcatccctggcatcgctttggctcttgcgagagggagccagttttaaggatgaaaccgtaatgcttccctggtggtaaggagttccttagcgcttggtgcagctcagaggctgctggctcaaccggattcagagtttccactgccacagccgcgtcagaaagactattactgctcagcaattgcctttcgggattaatacatctttactcacatgatcaatttcagtctcctactggatacggcctcagaagtgaaatgtgaacatggacttctatcacacccatgtcccggtgaacgtccatctgcaactaacccacattgacaagcagctaatttgcagattgtgcctgtatcgacagttgggtttgtttaataatagatagttgctgtcttccctgggttctgttcatgcagaaggtctttgctgagacggaacacgataaattgcgaatgtgtttacatggacattcccaaggccccggggctcgtggtcagactttaaagaataataaaaataatttttgttgtaggaggagttcctgatgagggcgcttaaatgagccgatcactcggcgtgggcaggagcaccatgcagggagacccagcctcactgcttggccgatactcaatgaacatttgcctcaacagataaacacgcttgcttgagcttcatatgccctcccaggctttgaggacctctgatttataaaaataaagcagcgttgaggtgccacaggacagtatcctctgcaagactcccttcggcagccacccctgtgcttggctgtccccgtttctttcttcctttctttccttttctttttctttccctccctccctcccttcctttccctccctccctccctttctctctctctctttctctctttctttctttcttccctgagtttcgctctgcagtacagtggctcactgcaacctccacctcccgggttctcccaagcaattctcctacctcagcctcctgagtagctgggattacatgtacgtgccaccaagcccggctaatttttgtatttttagtagagacggggtttcaccatgttggcccggctggtgtcccaacctcaggtgacccacctgcctctgcctcccaaagtgctggaattacaggtgtgagctgccgcgcccggcctatccctgtttctgatgtgagctcagcctcctcagcagctccccttctcccttgtccccttctggtcctagccacacaccctggatgctgtctgtgccctggctctatccgccacccaccaccaggaactcctgcatgtaggtttacaatccagatctctggcacctcctagatcttactacctggttactggtgccaacgtcactcaacgtgtgggacagagaacagacgagggcctctcccgaaacctcctctaccgctgcccctcccagtatagtcaatggcactaaagttgattcagcacccccaaactcactgaaattgatccagcacccctaaactcattggaattgatccagcatcccaaactcagatctctgggcacaacccttccccctcccttgtctccagtgcccacccaagttgcctctaggtcctatgcattcttcttccttaacaccttctgtacctgtgtgacctccgctacccacaaatccacatggctcaggccccttctcttcctagaacatggcgcggcctctgaacttgatcctggctcagaaaccctacagctcccacatccagcctcaactcagtggccagacgagtcggctgcatggcaggttccgccccattgtacacttcacagctgcccacaggctcagggaaggttcaagacctcttggcctggggctgaggatgcccacacctggcaccaacccacctgcccacctgcttctccctcggctcccccaccaggggtctgccctcaggctgaggagagcgtcttacagctccccagtggccgagctcacactcctggatccttcccctccctgcctgaaaagactgagccctctcactctacccagcagcctcttactcacctggagaccaggtggcctgagccagccttgtctttctccatctctcagcagggaatgagtctgctgaccacgcctcatgcctctggaagcacactttgtcctgggctggcccacaccctcctggtctccccatggctctggcccttcctcctgcctttgcctagtgggtaactgggcattgcagggccccttctccttccaccctttactttctccccaggcaacttcagaggtctggcttcaacccgcaccctgatgccagcaatgcccactctagccgagttccctgtgggtccaaccttttgcttcccttgatgtctcccagactgctctgtcccacatggctgaggctcagggtcttctcccagaaacctggtcctagctcagtggtccctatttcagtgaatggatctatcacccgtccaagtgagcaagtcagctggggtccactctgaccctccctctcttcctcccccatcctccaatccatcattgactgtcagtttgacccaaggagttcgggggcctctagaggctggaacagggaggcagtggactctccctcggaaatgagctctgatggttcctcgatggtaaaccagtgaggctccttcctgacttctgccttccagaactgcaaggccacccatccagctcgtttcaagccgctacgtttgtttgcgacggcggcacctaatgcggtcctcttggaaagttctcagcgtcacatcgctctggctgtgttgaccactcccagccaactgcccctctcaatgcccctctcctttcccttcctttttgggtcttcatgtccacagagagtgaggcgtggacccaggctttctgcctctccaatgagacaggagggcagggagctgaaaaatctcaaatctgccaaccccacccttccccctctatcccgcccggcaagccccagccccctaaacccgcagccttctttgccgtctacactcagcaaagtcaagtccctctctgagcagcctctgcttcccagatggagcctctggccctgaccctgcggggtggtgctgtgtgggaaggggcaagaaaaaggaacaagcaacgcttgacaaggctgtttcaggtcccccttcttctttcagcccaagtagatcctggcggccgacagacaccgcagagggaggtaaccaccactcctcctagcacaatgcatctggtgctccctcaagagctgccaaagccagacggggctcatctttccccccacctcaaatacctgcccttcaccacacacacatccggacacaaagccggggaggactcgaattaatttaacttttaattatattcacttaacaagatgatccagctgaggttaaaaaaaagtctgcctccccgcccagatgaaaaaaacctcttctgtatctatttatatccagtatatacataaccagaaacgaatctttctttatggaccattaaagatctaatgtttaatttatagccactttctctggcggggtatccaggcacaatgtcaacatttttaattaaatgaaattttttttttaaatcacaaaggaagatatatatttttaaagccacatttgagccagtgagcaacagccctgagttgctgcttccaggaggtgctgctggttggagagggtgccggggaaaggggagacatctctggaatttcaaatccctggctggccagtctgtctgcggttagggtggcaggggtgtccccagatgagggcatggcagtgtacctagcaggggaggtccccagctgctgtttgttgagcacctactgtgttttgggcagtgccctagagggttttcacatgccatcatctttaattctcccagcaatggtccacggggtggccatgggatgggattaccacggaggaagctcagagaggttggacaccctgcctgaggtcacacagtagcagatggatgaagagcccatgtctgggtccaggtcaggttcccaaacctaagcacttttctcttcccccacgcagcctctgagggcgggtatgggagggagccttctccccagctggtggcaggacttctgagtcctccatggtgcaaatgaagtcactgcaatgcccaggtcctgggcagggaggcaagttcaccactgcatcgctagcacccaggacacaggagcctcacagaagtcatttgctgagttttgcagttcatgagagtgaaagtgattttccagaaggttctcagatgtcctggcttcagggagcagggcccctgaggtctggaagaggccagctgctgcccagtcctattcctgcctcgttcagaaccctgcccaccccgcaacccccaggtggcagcaggtgaggaaccttactcctgagaccctcagccctagctccacatacccccaaacctgccccccaatccaggacacatggcaccagggcccagccttgagaccaaccagctggactcttgcacactgacctctgaacatagatggagggaagcccttgagttgctaagcctgtaggtgaccctgactgagggttctggggctagagatggagctttgggaagctgagcccttgaaccctcagctggtgaccagtgctggccccagggatctcccacctgcttgggttggtcttatgccaccaggggccacttctgagccctcttggcgattcgtatacttgcccctccatgcagtgtcagtccaggctgtgaaaaacccgccctgcctgagtgggtgccttacctggacagtatccaggtggacaggtgccttatcttggctgggcatgagaggggtcccagaatgtctggaagtgctggatggcccaggttatggccacttggctatcaccatgggctggactctctaaggacaacgtggggcttcaggctgacatgctgggattggcaacaccccagactcttgctctaggtagggcctggggcaggactatgtgccctgagccctctatcctgggcaggaactgtgggtcagagcggagggcaggcagcttgtccttgggaccttgctggcttcctgcccccagggcctgtatctgcttggcctcccctccttagccaactccttgacccctcagaaacttgacctctctccaggcttttcctatggggcctacccaggccacacccctcccagccagtctggtgctgcctccaggacagagaatgggagctgagtggccctgtggtcacatgtgtgcgtgtgtgtgtgtgtgtgtgtgtgtgtgtgtactgggggtgtggcatgaggaggagcactggagagggagtctggggtgacggtgccgtagactcactatggtgggtctcagcccggtggctgaacatcagtgacaccgttgagagacacgtggacacttcaacatctgccctgctcttcaaagaagtgacctcacaggggcatagtccctgtcaccattctccaccccagagccctggccccccatctgtgctcaggaacaaggctgtgcttaggaacaaggctgtgtccacccttgaattgtccaagggtggaaattagaggcagccagaagccgaggctagcatgagccagcggcctttaatgggacactccatcttcccctggcgaccgcgtctcccaggaagcctcgggaagctgctgagtcaacactgcatgggcagggtggccggtgctcagcagcagcactgggcctggcctcccagtccagctgatcaccatcccgggggcacctgcagctcaggggcagcgtccctgggcttctcctcctccatggctgcaattccccttcctagaggggccgcagataggaagaccctcctgtacatcccagggacggtggatgttgctggtgtagggactgaatcgacaccacttctgggactcctgtcttctgcttggggctggggatcctggacccgctgcctgccgagcacagaggggcacagctgcctccccagccaactccctcgggggcttccaaagcagccatccagaaaatgcctggtcatagtcctctaggaatttctggagctgtcttccataccaccaacttccctggtgcggacgggaggggctgacctagcagtccatggtagggaagccccagcccattgtaaaccctcccagccccgccaggtgtgcacccccgccttgctcaaccttcatcagctgtggaggtcaagagcctcatcactccctcttagctctgctccttcctgcagggaggcacgcttgtctctggggcttctattcccataaaccgacccttcctttctcatgtgaatccactttaattacaaagctaaataacgagaaggaaatattaaaattaaaaaaaaattccctacacatagcaagtttgcttgtgccggccaccggctccgggagctgaagcccagagtgaggatggcaccacgccactcactaaaagcatgagtgtccctaaatcaataattcatttactttaatgagataagtactttgaaaactaattgcaaacctgctccatttactccaacctgctacagcccttaatgtaaatcgcagaaccatggctgtggggaggagaaagtctttaggtggaagacactgtgtcatcttcccctttcttctaagaaagggaaagaagttctgccaggtacggtggctcatgcctgtaatcccagcactttgggaggccgaggcaggtggatcacctgaggtcaggagtttgagaccagcctggccaagaaggagaaaacccatctccactaaaaattcaaaaattagccgggcatggtggcgcacgcacctgaaatcctatctactcgtggggggctgaggcaggagaatcgcttgaacctgggaggtggaggttgcagtgagccgagattgtgccactgcactccagcctgggcgacagagtgagacaccatctcaaaacaaacaaacaaacaaaacaaaacaaaaaaaaaacaaaaaaaagaaaaagaaaaggaaagaagttcgtgacgcgggtgggaggaatctggggaactggtggactcctgctgtctctccacctgccctaccgtgaggcagcagacgggtcccctccagtatgaggttcgactcacatccttcccctgggagagagggtagcactgggaagccggaatgtggcagcacacactacaatcaatgccgggaagtgactgtcctggggcctccggggactcctgtgagtccctctgccagcaggtgctctgagcagtccttccccaagccccgagccccgggaggtttgtgcggttccagagacaccagcacagggatgcatgttgttaggtgagttttcagttcatgctttggcaagtgaagtcccaaagggtccaatgttccaatagcttccccagaatacaaacccgagaccaaaaagatgctctgactagcaggtgccctgaggagtctgctgccaagatgctgagagcacagcctgtgctgagtggaggacagagcagcagaccaggaagctgctcacctaccaggggtttggccaaagggctgcagggcccatggggccaggaaaagacacctgagtccttctcactgttctttgctttttttttccccctctgagacagagtcttgctctgttacccaggatggagtgctgtggtgcagtctcagctcactgcagcctccacctcctgtgttcaagcgattctcccgcctcagcctcccgagtagctgggactacaggcacatggcaccacacctggctaatttttgtatttttagtagagacggggtttcaccatgttggtcaggctggtcttgaactcctgagctcaggcaatacactcgcctcagcctcccaaagtgctgggattacaggtgtgagccaccatgcctggtctgtcctttgcttttgttttgggaaaaaaaaataaaaaaataaaaagcaatgatggtacatttttcagcttctaatcttgtggggacgggggtctcaaatccttcttctctctccccctttatccccttctctccccactgtctctctttctggtttttggcctcactgggaatagatgccaatgcctacacagaagtccaagtttgcttcttgacattttcaggaagagcctgttttagagattatgactcttggaaaatgcagaagaacctatttctgctttgctgctagacactggttggtcctccgcggtgaatagctcagctaaaccaatccagctctcagggctgacccagtgcagggagcaccacactgacaggcagtcgcagcaccagacagcagcctccagtgatacgccgcagacacagagaaaggatctgaaacggattcccgcttaaatctcaaaccctactcaatactcctgtactgaggtgaaagcagaggataacatctccattcctcagaacccaccaggtgtgttgccgtggaccacagtcaaggttgctgctgttatgattcagcatttactgagcacgggaatgtgctgggccagcccttcccacgggggtccctgtctaaatggaacacaggttccccagcctggatggagccaggaccactaacgacactcaggggtcagatcctgggcagactaaaaggagctctagagcctcagggccaagggagggtgggacagggaacgtggcgaagttcttctcaggtgcacccagcaagagagatggacaggccctttggaagatcaggaggcaggggctggttggtggggggtgcactcacagctgctgaagaccctgttcaggaagggctcatctcctagtgggaatcccaccctcgccacaccatcctcctcctgctctgccgatgacagagagggtcctgcacctgggccaccttgtacttgacccggctatcacagtccacctgccatggctactcgatgccatgtcgaaaggcgccgtcccagcaagtctggccccaaagctgccctgctttctcagcgcttgctagagggaagcctgctctttctaagtggctgcagctgcttttgcagagtcgcttatcacttgcaatcccagctctaagtcattgctcaaaaccagaaatgtcaaaattctctttcccttataattctgcccttcaggctaaactgtctgtagggatgacgacagcagagcactggtgggtactgaatgctgtttttctatagacccacttttcttctccctgaaatactgacccaatacgcagctggtgtctggcccacctggcatctgtggactctgccccaggggctgtgctgtcctcgggtcgagggtggagcaggagtggggagtgggcacagcaccgatctcgggtagggtccacctgcaggacccgcagccctgtggcaagagggtgtgttctggggtccctgcccttccgtggtgagggcagctgcctgtaccccagaggcgaatgggaaggtgagggcaggggcaggaggcaccagagatggggtcatcgccagagaagagctctcctgtgttcctgagaagacaagctgcaaaccagctgcatctgggaggcaaggcctgaggagggaagggagcaggcaggactctgggggcccaggtgagatggcgttgcctgggaccgcatggaagggaaggccactcagctgatgcagaggcagctgggagggggctgagagcagggacctgctggtcagtagaccgggctccctttgctgagcctggcaatcctgcgttccccgggagccaggagacgcagggacaggctcggtgtggcctgggtgtctaggtgcccccgcatctcagggtcacagtagccgcaggggctctgcagcaggcgccattctcagtactgggcagcattttccctctctctctcctccctgaagaggcccgtctgagcattatccctcttttgcagatgaggaaactgatgctcagatatgtcaactgtgagtgcagcagggatgtgaatccagtcaggtgggctgggcagccagatgctgagccccttcctggccgctgactttccctgggtagagtgaggaccatgggagatggtcctcacacccctggtgtggggagccctctggacaggtagagtgctgtctgcacatcccttattgtctagccagcacttactgagcacccctgggcctggcccagcccatcggccacctggtttaatcatcaaataaggaggtacagggggaggtggaatgggagcctgccttgcccagaccctcacacccctccccactggctagctgtcggggaccccctgccctgctgaggctcagcttctcccagggccccttcccacaaagcagccccatgtgccggcacctgctccctgccacagtggatccagcactgtctgtggcctctgccccacacgttctgggccctgagtggaacccagatggggtcttgttctttcccctgcaccttggagctaggaaccctgagaagaaagaacgtggcctgagaagggccccagaaagagccacgaggtgcccacagtgcacgccaatagagcagagatgccactggcacctccacgggtgaggggtcagctgctggggccaggcccgtgcccctaactctgagggcagcactgatggccaaggccaaatccagagccccaggggtggcccagagaggtgtggccacactggcctgaggctgaggacacagccaagctgcagccagcttgcccggccttggggcctgatgggaatccgacgcccctcccctggggataggaacatggccaaggaagacgctgtaaagtgcgagaaaatggcatgtaggagaggattttcagtccacatcacagagcaactccaaagtcctttcccagctctgaggcccaccagctctggccgactgccagactctatcaccctccacgggccgcacactggcctcctcactggccctggcacctgccggcacactccacccagggcctttgcaccaactccagcctctcccctaccatccatgtgtttccctccctccctcccgtcctggggccggggcctctccccaccctagctgttcctcgcttgccttcgatctttgcccagatcctttttctcacctcagtaaagtcaaagccttcatacccctacacccctccagttcccaccccacggcgttcgctcctcgagccccctacaaacatactcatctgttcccccaactgcccatctcccctattgcaatgtaagcacaacaagagatttttatctgctttgtctcctgatgtacacactgatgtgtctccagagcccaggacagggcctggcacagagcaaacaataaatatgtgtgagtaaatgaaggagggggcacgagcaccccgaagccacatgcacagggtctctttctttttcctttcctttttctctcccaagacccaagacctgcttttctcttgcagaaagtggtgttctgaggggcatggagctccttggaaggagccggaggcagaggatgcaggtggaggcgctgtactgccacagtcccccaggagcctcccaggcctgtgcggctctctctccccggcacaggattccctggagggctctccacagtgcagagtcaatgatgcggcaggtctggggtggtgggggtgcatttctcacaaggtcccaggtgacacggaggctgctggagcaggggccaccgtctgagcagcagctcgcacacaggcgggtgggcggcaggaccctccctatcccatcccgcactggtcgccacggggaccttggtgtgaaaccaggatgaaggctgcacaccccacgcttcccctgttcacacaagaggcccccagagcggcttcccctcctgtttcttggcagcttctgatggaacccgaagaggggaggggaggacttcaggtgctcacggccggccccgcggaattgtgggtttgcctttactggggcttgtggaggggggaggcgtacgaacacctgcaatattaatgcagattgctgggcatcgggatccttcacacactccaaaactttgctttgagttcctctgagattccttttgaggtttgagattccttttgagattcttttgagttatttgagtaactttgagattccctttctctgcctgggctgtatgttaaaccaaaaccactgctctggaaaagcctctcgtggccacagctctgtacacacaatgtggctaagcggcggccaggccaagcccgagatgcggcggttctgagcctcagcttctccatggaggctcccacaagcccagagctctgcagccaggggcaagtcccgcagccatggggggccccggacaggggctgtgggtaggaaaggggtggccaggactggcctgggagccagccatgaccctgcgcaagcagatcccactgaggggacacggtccctctccttggtttccctgccaggacttgcacatttctctgtgaattccacctcggtcgttctcctttgaagaacaatcgatgggtagatctccactgatcacacagggacaaactgattaggatcctaaattagatcagtgctgctgtctgctcagagggcaggaccccttaatcctattccagtctcaagaggtggagggaggcccaggctggtgggaagggctgtgggccctctgtgcaggctcacggtgccagctgtggacaagcccacaggcaggagtggagctacggatctgtggctgccccgtgtgccccacaaggctggagtccatccttacttggggcatgaggacagccaggccaagactggtccaatagtatcagctgctccctgttggatggaaaccaacccatatgccttcagccatgagcactggggcagccccaatagggcgaggctccttcttgcttcttggctgcaaagcgccagctctggttgccttctccttgtttcaggtggcctggctgccaaagctgttggcagacacttgctgggctgatgaactctgcaggtgaggctgcagctggtaaggcctcagctgcctcccccgggagaacttgctcttggccactctgggttgaggcgacttagctgagcaggcccaggccttcagctcaggcagggtaactcgcccaggcctagcgtgcccctccagggtcccagggccccgcgaagccaccctgacccaagtggatgctggggtacccccccggctgtgctgcctcccccaacctttggagggctcaggctctggaaacactcaggctagagggagaacacagcaagggcaaacttttcgtgatttctgctctttcctctctcccggcccagcattgggaaggtggccagcacttttaaggaacaatccaagtgaacgctggtattttacaggcactttgtaaattctgcagcacttgaaatttatgtgatttgtttggaacgctggaaggcacgtggagtttctgcggacacagaggccttctgcccctggtcaggtttttaccagtcgtggcggggccctgggccctggctgggagagtcccgtgctgctcgtggcagaagtcctgggagtggccactggagaggaggcaggaaggcagaggctgccccagctcatcgtgagccacccccacctgctctctagggtggccaggtcatatccacctggaaggcagaccaaatgccaccacaccccctctgccccgagcccaggctccatgagagctaggactctgcgtgttgttgcctagaacggtgcctgacacacagggggcagccagcgaatggctggatgaacgcgcgcttacgaggggcagaacgatgtccccaagaaggtatgtccagtcctaacccccagagctggaatgtgaccttatttggaaaaggatctttgcagatatgactaaatgaaggatgataaaatgagatcatcctagatttagggttagccctaaatcgaatagcggttgcctttataagagaaaggagggaggcttgagacacacaaggaagaagggctcgtggaaccagaggcagagattggagagtcaaggaatgcctggagcccctagaagctggaaaggcaggaaggacccttccctagagctttggcgggagcgcagccctgttggcatctttttttttttttttaagacggagttttgctcttgttgcccaggctggagtgcagtggtgcgatttcagctcccggattcaagtgattctcatccctcggcctcccaagtagctgggattacaggcacctgccaccacacctggctaatttttgtatttttagtagagacaggatttcaccatgttgaccaggctggtctcgaactcctgacctcaggtgatccatgtgcgtcgccctcccaaagtgctgggattacaggtgtgagccaccaagcctggcttttttttttttaaagacgggggtctcactatgttatccaggctgtcctcgaactcctgggctcaagcgattctcctgcctcagcctcccaagttggtaggattacaggcagaagtcactgcacccggctcctgctgacatcttgattttagacttctgggctccagaacagtgagaatccatttctgttgtctcatgtcacccagttcgtggtcatctgtcacagcagccccaggagactcatccacgtgctctggtctggagtttaattctagcaagagcagattctcctcatagcttccccagttcacccacctgatgctgtttctgttttcctccctgggaccttagcaagcatgggcccggggtacagtctctgtgattggtgggtcctgtgtatactgccagaggcggtgtgccccacgaaccgggcctcgacttccccatgttctgtgccttctccttggctcctgcccccgctggaaggttctgctcccctgtacggttctgcagggcaagctgggtgagaacatggggaagtgtccggcattactgccacgaatgcccttggagaccctcagtgcgagaggagggggggggggcgcagatttgtggcgatcataaaaactgcatcaaactactacagaaagcagcccatgcagctctgttccaagcagactttccaccacctcccctgccagatgccacgctcggcagtgaccacagggtgagctgggcagaggcagtccagccccccgttccaaaggacaaaacgcagaacacaaacagttccaaagaacaaaaccctctcaccacccttcagcctggaggaatgctggaaatgaaaccaggtttcatgagcttgctcctaagtttttaaatgtaatgccgtgtcctccccgaagccggccctggggggccacaattattaactgtcttcaggcggtcatggggagcagctggcctccggggctcccacagcctcccgcttaacgagggtttcaccggcagcagctgacactgtcctctctcttgctttttcctttccctaatagtctctcatgaaggacctcatcaaaagctttttgaaaacacaggtaaattatgtccactgggctgccagaaggactgccactttattaactttttagagcactctggagagttagagagtctgatttccttttagatatgtgtagcagtttgaccttattacccctgggcacgcgggtctgtaatttccagggtctcccaggctgatgttagcgactttccaatttccagaaagggcttagtttccgaatgcctttcaagatcactgctattttatactttctaattccattaggtgaattctctcccattccggagatttagtgggctgggattttgcaggtaagcttataacctgcttcctgagagcctgcggctgggcaggcctgccaactctgggcaggtcgtgtctaccgccagctccaggtgactttggacaggtggctcagaactggcttggggagggggcccccacagagctcaggtcaagaaggctcatggcacagcatccagactgcttaggcagcaggaatttaaatttatacaaacactgtgtaaatccattcccgctgtaacagacctagaccagagctgacttttcccagagggctgctcacccggaccgggcaggtgagactgtctgctccagccttcccgcccctctcagccttctctgggcattgccctgccctccttcctttgattccaatgggaaaagaccctggttatagcagcctgttctcccatggcagaaacaaccttgaatgaagtgagcaagtttcctgtctggcctggcctccatccccagctgatgtgggagcctggacttcttggcacattccccttgaggacatttcagccccttgaagggaagtgtcctcatcctcgtggtccaggcaccttctcaccttgtttgcttcagcttctgatttacctgctgaagtcagtgctccgcccgcccatctcatccagctgtgctttctgtgttctgttgggactgttccttttcttagggggtattattcagaactgggttggaattgtttgctaagtttctgtgttctgtgatttgactttcaggagggctgttactgggccgggttcccaacgcggagctcccgaagtgcttggaatttcccgtgtgccaggacggtctttagaaagttatgagatgactcttggtggcccctagataagatagcttcagaatgggagctggccccagagacaccaactttgtgattagagggctgggacttcagactggctcaacctcaggagaggggagggggctggagatggagttcaatcaggtgtccagtaatgtcatcaatcattcctacataatgaaatcctgatggagaaagctctgggcccctaagtgtggtggagcttcctgcttggcgaacacgtgggtgtgcctggagagtgatggggtgagggcataggagctccgcgctcctgctcagacctcaccctccctggatcctttataacaaaactggaatcatttgcatgccactttcttgagttctgtgagatgttctagcaatgactgaacctgaggcggtcatgggaaccccagaatttgcagctggctggtcagaaggtgggtcctgaaactaggagctggcttggaagttagggtggtcttgtgggggactttgccctgcaccttggagtctgaggctgactctgagcagtgagtggcagaattgcactgaagcccacccacttggggtgggggcaagggggcatcacaccagatgcagaccttgctggctctgggccctgtgccatctctcagcctcggttggggagtcatactctttggcgggtcgctgaaactttagggccttcagtgcctccccttcaagctgatggtgatgggatggatgatctccaagttctgtccagtcctgaaatgctgtgaccccgagccaagatgcccatgtcactctctctcttttttttttgatttgagatagagccttgctctgttgcccaggctggagtacagtggcgcgatctcggcttactgcaacctccacctcctgggttcaagtgattctcctgcttcagcctcccaactaactgggattataggcgcatgccaccatgcccggctaatttttgtatttttagtacagacaggatttcaccatgttggccaagcttgtcttgaactcctgacctcagacgatccacctgcctcagtctcccaaagtgctgggattacaggtgtgagctaccaggcctggccccatgtcactctctatggaggaagatgccagagctcatggccttgttgtctgggaccttggctgacaccattcctctcagggagagacctcctgagtcatggagaagcccaggaagggtctaaggtgtggaaacctgggcgtgtcaactggcaaggtagaaggaggaggagctaggaacgcgcaaggcagagagaaaaggacgggaaggaggtgtctctccagcctaactcttgatggctctgggctctatccacacgatttctaaaatgccttccactttttatacccccactatagaattcaacctgcacatgtcaaaaatgtcctcggtctctgcaaattttccccttctccagggagttttcacctctttcaaccctccgcatcatccgttgtctctcccatctcctggaggcggagtagatgcgtttcctggctgccgtgaggggcaagcagggagagtggcttctcgtctgcgagtctgcgagggtgtcccctgtggggagcatctgctcaggactggcgggttgcagaccatctagccagaccctggccaccctcaggttgcctctgtaaccgtcccagtgtttcccagcccaccttgcctcacctcccatttcattccagaaactgcccctactcaaaagttctcccctgggcatgaccgacattgcctcttgatggcttccccatgggtctgagtaccacactcctgaccacagaggccaagctcagccccttcctccaagacagaccttctggcccttcctcagctggggtgctgctaactctcccgctgcgggtggggacgtctcttctgccctctgagctccagccacagttcccaggccagtcctctgccatcttcatgggaaaaggaagctgatcttctcctttgtgaccccaagcccctggcctgcacatcctcctggactcccttcccccaggaaaagccacactcatgccctggctgactccagcccccgtgtgatgacccatggctctggcatccctcccgctccctgacttcccacaccttcactccgctccccatctgtccctctccagtagcccccggacctcatcccaacctgtgctgcccgctgcctgccaccctctttcctctttctctcattcctgttccttcctcccacagaggacattggtcctgggcctaattaggacagctcagccattgctccctgaaacgtctccctctcacccccttgtcttcacacgcctccttgtccagcttagctgttgtactggggtgtccccccaaattcatgtctacctaaagcctcagaatgtgacctcatttggaaataggatctttgcagttagctaagatcaggtcagactggactggggtgggctttacatccaatcactggggtccttctgagaaggggagatgcggacacaaaagatagagacgtgcaggcacacgccaggaagaaggcatgggagggctgaggcagagattgcagtgatgctgtccccgccaagtaatgcccggggtcccaggagctggaagaggccaggatggatcctcccttagagccttcagagaaaatgcagccctgcccacaccctgacttcagagtcctggcctccagaactgggagaggaggcatttctgctgttgaagctgggtagtttattacggtggccccaggaaactcacacagacgccaggactcaaccatccaagaagtcacaggtcactgtccaggactcctcgcaggcagcaggtgctcaatgaatattggcccttcccactcctgcctctgagagctgtgggaaaaaattccccccttgaggatcactaccctataaacacaccttctctattgtcacctggccctctggatcctcctccccgtctccctggggatcgtcccatccacaccttctctgttctccccctacctgactttctgccggtgacctcccctcctgttccactgtcagctccctgcaccccccacctcttttctcctggcggggcctgggtctttcctctcccttgtctgtcactgtcctctctccagtgtcaacaccctgtctttccttgccattagcatttaaatgctgggttcctttccattgtaaacatcatcacaagcaagccttccagcaaggtgagccccaccactgccctcatccacctgcaaactctccagcaaagtgagccccgccattgcccttatccacctgcccacactgcccctccctgtgcctgccctgcagcatctggggtggggacgccactgctgccctcagggcctctgctgcttctccattcagcgagcatctgtctgccttcttggcttgacctctccccctctgcgaatcactcccttcctccttcttgccaccctctcgctggtcttccgcctctgtggccaccctcctggttctcctccgtcctccttccctttgccattggctcctcttcctcaaaaatgtcagtttccatggaggagcattccctgctccctttttcccaactcctctgccagggcccccgccatggttttgagaacagccctgtgctgatcacttccaaagagaagtgtgctgtccttgcctctctcctgagttcagaaccatctctgcaggtgtactgacctgtccactggggtccctcagatacccaaacctctaaggctgatctcagtacccttccctaaaagcctctcctcctgcactccccagctcaagagcgggcaccccctcccctgtgttgctcaagccaaacacctgtgacccatccaccatgcctccccttctcctgtacccaggtctgtcctttcctattatttaatatggccacctctcttctttccctttgccactgggcaggaacaagggccgccatttctcactgagaataatgcaatggtgccaggccaggacgcaccactaaaggcatccaagactggtccccctccaggtgcagcgcctgcaaagagagcgatgtaggcagagtaaggaggggaaagaggcagttctggcggccctgttcctcctccactgggcctagggggcaatgtggggaagccctcctgctttaatccacaaacacacagagggacaacaggctttgcccactggcatgaccatgacaataccttgcacagagcatgtactacacgccatcttcatccccattttgcagataaggaaatgaggccgagaggttcagtcattttccaatgttatgcaacaacatgctagggctggattcagattccttttctttttctttctctttcttttcttttttgtttttttcttctccaaagcccaggactgatgacttaattttcagggcccattgcaaaatgaaaatatgcatcttttcttaaaaattcataagatttttttttttttttgagacggagttttgctgttgtcacccaggctggagcgcaatggtgcgatctcggctcactgcaacctctgcctcccgggttcaagcgattctcctgcctcagcctcctgagtagctgggattacaggtgcccgtcaccatgccctgctaatttttgtatttttagtagagacagtgtttcaccatgatggccaggctggtctcgaattcctgacctcagatgatccatgtgtcttggcctcccaaagtgctgggattacaggcgtgagccaccgtgcccggcctaaaaattagtaagaatttgaaggtgggacagcagagcattaagccaggcatgggagtcttctaagcttgggtcggatccctgtgtgcctgccggactcaagctcattagccgctctttgcgctgtccttctccccgggcagggctttctcccaggatcaggtccctcccaaggcatgctggagccctctctctgagggcagaggatgcctgggccatgttcctaccaccaagtctttcttctgactttcccttctcccaccccatctcattccaactgaaagctctgaccctgcggctacttccctgggtgaccctgggcaaatcaccagacttctctggaccccgttgcctaattaaagacagtaaggacactggtcctaaagggtacagagccactgtagaaagtatcagatcccagagaagaagcggatcctactcccaggacaccatgaggagagtcaggacctagaggcacaggagttccccgggggctccccatggctccaaagggtctagtccagccagtgaccgcaagaacagaatccacaccagcagccggccacagagggccggccagttattcagcactgagctggcccttcccgcggaatatatgtcctcaaaatagcccgctgggtgggcctggttagggccatctcccttttcggggtgggaacgccgaggctgagagacgacggaaacttgtggagtcaggaaagggcgagggggagggtggttaacaccagctttggggtgtgtggggctccctgctggagagaaacagtccaggcttagagaccagaaatacacaggcagcagccgccgttgctattggcagccactggttacatggcctttgtggctgggggcggggggctctgctgatctcggggttaccttgaatgagaccctcacattctgtttgcaggaagacccaggcctcactgtctgactgtccctgtgacacatggctcatctgagtccaggcctgcatgcaggtggcaacacactggtgatattatcacttaaaatcacaagataacgggaataaccatcagcattttctctccagtggttgctgagacaagccattcccctcttctcagtgttacacaggctgccggccggcctggggagccacatggcccctgcccacgcggggccacgcaggtcccacctggctgcctccccaggtggccccttcgtttcctgaggagggggtagggggtctctcctgtcctcctatcagatcgctccaactgccccctttggggacttccctgttgttggtgaaattgtttaagttgggagttttgctcagttccagctctgtcatcgcagataattgtgtcacctggcacgtgttcctgtgtgagtcagtcctggggtgctgtggagggagggctctggatgcaggaagctggggcttgaatcctgccctcttcctctcctgtcccctttcccaacatctttctccagaaagattgtcttcccgatgtgccagctgtgcctgtctgcttgccccgtgtccccatctctagggccaccccagtaccaggagcctccgagggtggtgggccatggcagggaagccactaacctgctaggaatttgaaaaatgttcccacgtttcaaggggcgccatgctggggctctgcctcccaggggtagcactgactccctctggggcttggcttggagccaaagaacagagtggtgacctgtgactaccaggagtccctggcggaatctagccacctggtggacgggtggcactgccctgcctgtgccagcagatccagggtgttctctgagcccctgcagcaatctgagtcaacccttccacagccggcctgaagcccccaggagtgacgtccaccaccagggattgagggccacttgcactcttgtcattttttattggttgtggggacagggctgagaccaaagtctgtattcagagcaatctgcctgaaacctggtgtcacaggaattttccaggatacttcagtccagggctgtgagaaggggagagagtgttttagggtggggtggatggagtcaggttgttggaggaggtgtgcagaggccttcacatagtaggctgccctgtgcccagagtcccagtggtcccccagtgaaatcaccaagccaggcttagcttggcaggctatagggtaaacagtgctctggggggggcgggggcggggtgctagcagatggggctagtcctggggggcagcgtgaggctggccctggtcctggggcacataggtggtcccaagatgggcattggtaccacagagctcagccccattggcagtgatgtccgagcggggcaggtccaggatggctgtggccaggtgccaggagctggcttcagtgcaaaaacagttaaagtccgaggacagaaagagctgggctgcagggagcccgtgccctcctgccacagtgacaggcagtatttgcaggggggaaggaggaaccttctgccaagaagggacctgacctggtccagccagctggagctgacccaggtctccctgcctcctccgtttcctgcaggcacaactcttccagggttggcgattcagcacaggtgtgccccagattagtgtccagcgccaccctggccttgtggagagacggttaggtgtcagcagagctgctgagccagggcaggggcggacgctgaccccatgcatacagctggctgagagaaggcggtgtgccctggccggtcctcccaccagcagtgtccacctgtctgggcactggtaccacctgtctgggcactggtacccctcctacaattgttctcaagatgtgctcctgccttttggctggagactgggatgggggttggatatcaggatggcggagagtttcctgcccctgtaacctggcaggagcttcaggaccttgctgcctcagtttcctcatttgcaacacaaggaaatagtaccgcctcatcggatgtcatgaagatgaagtgagagaattgtaagattgctcggcaaagggcccagcacatggtaagtgctcagccaaaccaaggtgtcgcagctcttctctgcactcaggcgcgagggaactcctttgtcctgctgtgaggccgaggagttgaagcttccgtatctgggcggggaggctggtccgacctctgtcctcccacctgccctgggcagaggctgttcctggtcgtggggctcagggagccctgtggtgcagggctggctctgtggcacctggaaatgccaagtcagggcaccagcgagggtcccctcatcccccaagaggctgggggcacagacgtctccacctggctcactccccgctactggcccccagacttttccaccccaggaaatgtctcccctgcctgcagcttcagcgaaagcccaggaggcacgcttggctcctgcccatcctccctgaccacggtcccgccagcacaatccaaccagcaagcctctcagccctgcctccaaaaccaaccccaaatccccttctctctacgtcctgctagtgccccaatccaggtcattttcaccccctccccacactagggtctcacatggcccccgcaggcatccccaccccacccccgtcccacctccatcatccaccagccccagagctaggagccaaactggtcctgccttagactcttggctgtgctacccggccttcctgagccagcctgcctctacaccccttctctctgcctctctctccatgtctccctctctctctctctctctctctctctctgtctccctccctatctctctccccctcccctggcctcatgctcctcccctggcctcatgttcctccccttctcactaaaatttcctcccagattcttctgaccttcccagcttgttcctggctggggcctgcactccagctgtccctgtgtctggttttctctgtccctgatgtcaccgggtcattaggtctcagagaggcccctgaccaccaggcctgaagcacagcctgggcctcacacttgttctgttctctgctgagcactcacgtgatcatgatttcctgtttggggactaatggtccccccccaacctccaagacggtaggcttcatgagctcagggccacccacatccccaatacctggagggtgcagaccgcacgctcactgaagtccttgaagggaagtgaaggaatgggtgagggcccctccccaatggacacagaagcacagggggtatcaggcagggttgccagcacaccactgtgcctggctctctgccagatgcatcggccaccctcaaaggacttcagatctggttacggtagctcccccaccccatctcacccatactaacactgtgtggtcaagtggcacatggtgggctatggatggtcaggaagcaggaggccctcgggctgggcttggagctggaacaatcagaggtgacatttcctctaaatccagagccaccggaggacccaggtgttccatccgtggtatatacccaagagaaacgaaaatgtatgttcaaacaactagctgcacacgcgtattcattgcagcgtcattcaccacagccaaaaacgggaaacaacccgaatgtcatcaagtgatgaaatgatccacacactgcagtccatccacacaatggaattgtgctcggccataacaaggagggcatttctgacacatgctgcaccgtggatgaaccctgaagacggtacgctcagaggcagaagccacacaaaggccccgcgtggcatgattccattcacgtgacacgtctggagcagagccatccagggatggagagcagaggactgtcccccaagggctggccgaggcagaaatgagtgactctggtgggtcaaggttattctgggtgaggaaacattctagaccggattatggtgatggttgcccaactctgaatacactaaaaacccctgaattgtacaccctaaaggagtgaatggcttgtgaattgttatctcaataaagctgcttttttaaaaaaataatgtttcttgaccaggcgcggtggttcacgcctataatcccagcactttgggaggctgaggcgggcggatcacctgaggtcaggagttcgagaccagcctgtgcaacatggtgaaaccccatctctactaaaaatacaaaatcagctgggtctggtggtgggcgcctgtaatcccagctgctcgggaggctgacgcaggagaatcgcttgaacccaggagtgagaggttgcagtgagcccagcttgtgccactgcactccagcctgggtgacagagcgagactctgccttaaaaaaacaaaaccaaaacacaaacaaacaacaaaaaccaaaaccaaaaatcaagaaactggagtgtttcttcagctgctgcaccggccaggcatgttctcagcagtccacgtgcattgattcagccaatatacaacagctctctgagggagaagagaccactgcccctcttgtacagaaggggaatctgaggcagggagagtttacttgcctaaggactcagggctggtacaggctggagcagggtttacagccagctccctgtggctctaggacctgcacagtcagccaccccatctgctatggctcccagtgagcacatgatgacgtcagcctcggccttctccaaactccaaggtggtggtgccagctccacttttgcctggaaggtcggtgggtgacactgggcacattgagccttgtgttccaccagggaccagagtaagcccagcccacttctctgccccttcctggtgcagcccaccttgcccccaggctgccactgggttcaggctctgtacacatggcacagcctggttctgccccacctgcctggctctgcccagatctttcaaagctccaaggcctccaaggcctccaaggattccaatggtggggagggggggggtagtgctgctcgactggtaccttatactgtaaatacagatataagtattacaattgagtttaatatttaatacaatcaggttaatacacattccaaactccataaataatcattagctgaggttctaattgtgctggtgggatccaacttcatgactaatttaaagaccagaagatattcccatactcagttccccgaaacaccataaattaacccgcagcccaatctctgctgttacagccgacgcggtatgtttgccaaggatggcctggccactgcgggcctctgcccaaacctccccaggctcactgcctggacaggcaggggtagcatgtggcgtgctgggccttgaaaactccactgggtcaagggtcaagtcactgttgcgggtggaggcttggaaggagggttggctgtagtgtgggggctcatggtgggaagccagctgcttgcaaggggaagcagaggatggggcaagccagaaggctcggagacagcgtgtgcaaacacagagcctgggcacatccccttagccccctgcagtcctgcaccttgggcaggggactcacggggatgggaggttgtctctgcagagttctggagagggacttcagagttgccaccgaagcaaaatcccaagagctttacaggcaggagggcaggggcagttttctcagcctgattggagacttctgtgtgatatgaggaaaaagcctggaaagtgtggctcactctgcaaatgtacacaaaatgccaacatttcagaggtgtgtggtgacaacaaggggccacatctggaattgagatggccccaggaaggctgggaggctggcccgtggcagccatggggggcctcgggggtccagtcctgggagaggcagcaccagaactccacagccctgctccccaggcctgacgggctccctggcccgtggctccaggctgcctgcagtaacagcatcataggatcacgagaaagagggcctctgcccccctcctcagaatagctgaggaccctggttcctggtaccccagaagagggaccccgatgccaagctcttggtgtcaccctgcctgatggggtggttcaggcgcctgccacatggcacctgctcccagagtgggggaggttgaagccagaactttgctggccctgcctcttggtgggtgccccctgcccagctgcctcccactgggaagtggcccttgcagtgaggtggggaaccagggagcatgcagaccccccaccctgcctgtgtgctgtgggcgtggcctgtggtgccggccgggcctgtgcccagtcttggcctggagatctgccctgccagcggcagcccgcacggcttgtgtctctgtctggtgtccaggtgcagcctcacacgaaaggcacccctgacttaagcctctaccctgtccaggacgaagatgcatccacatgcatagggcagtggcccatcgtcagcttagtggaatagccagggcacatgatgccagaacgggaagggacttagtgatctcctggcccagcccctccagtgacagatgaggaaatgcaagccgtgggaggagaggcaggggagtggtgccagcagccggttctggttgagcacttttgtggggccagctgcctctgcctctgtcatcccacttacatctccacatgctcctctcacaacttttggaggcacatattagtaatgcgcccattttacagatgaagaaattgagggtcagagagcttcagtcctccaattactagtggcagagctgggactaaaattctggcttagaaccacaccgtgataggaggaggaggagaggagagggcaggggaggggtggcaacagggtaaggtgggcacgggaggtgttcacggggtcttaagaacagccaggagaaaaagatacagaattggattagcaggaggtgtctctgcttctctaggttggacattttggggacatgggtcctggcacacagtaggcactcgatatttatactgacagggtcccacagcacccaggacattccctcctccagtgcttacattctgggacctctaatggtccagttcactcttgttatttttctagaccttgatgctgagattccagtgggtggagggagcatcccccaccaccctcacggcacagcatggcccggcccggcacggtacggcactgtcacggcgggttgtgggcacgtggcagatgctgggtgaccaaatagagcgaaggcatgacccagtccaaataacctatgtgccagccagttgtttctggtcaccctgtcctgtccagctagcactgctagcatttgctcagtaaacgcaaactcactgcaggcaggcctcagctccccacagccagcaaggcactcccacggcagacagctctgccctgcaggctcgtggttgcagatgtaaacttcactccttgggagctgtgggctccgctgtccaccccaggcagggggaggtcacattctcaggaaaggggatgcaggttagtgtttgtcactgagaggttggaaaaaaaggacccgtgttgtctagggaggaacaactggaaggtcttaacaactccaggcaccagagaggtgaggcacagtccaagaggcaccgcgtgtctgtgtgtgtgcctggtgtgtgtgtgtgcttctcagaacaattctaaaatagtaatgggtagtccagaggaaaaaaatcatgtcaccattaagaatgtcaccacacccctatgggaagagcgaagcagcagctagggttgtagacagaaggcacagcatgcacatgtgtatgcacacacacacgcacatacatgtcacacacatgtgcgtgcacacacacacgcacacaccactcacacacacatgcacacttatacacaccacacactcacaaacatgcacacacacgcacacatgcacacacacacacatgcacacaccctccacacacatgcatatacgcacatgcacacaccacacatacaccccccaacacacccaccctctgaggaaaccatcaatgcgacaaaaagaaaacacgtgagtcctatgggactgtctgtgtgagatggagaagacacacagagggtctgggcacaggacacacacacgctggaatgtgaggcccacccatcaaggccgcgatgccttcctgcgaggcctcccacaccggagctcaagctctgtggagctccaagttccatggaggggcctcacccctgccttgagcaactgggaatgtcttcggagtgagctcaggttcccataacgcctttgaggagaacacgctgattcaggagggtgttccttttagagagtgaatttagacgaaagtcattatgttttggtcacagtcatgtagacgggccttggggcgcacggcaggcggggctggcatcctcctatcaaagctgagcacaatgaaccgaagcatccagatttgcctctgctttgccaggggcctctgcctgcacatcatcctgagaccaggaaagagctgccaggcaggctgtcccattgtggggggggggaggggagggtctcctgcaggcatgtggggcacagctctgccatccatcacgtattacttagaacattctgggaagaacctcccatcaatcaggagtgtaggagaagaggcagtgaagcgagcacgtgggtgaggacaggggatactgaaagatgatcccctatcacctccagaccacatctatcacccccactggcaggtggcagtgacagatttcacaagtgcttctgagccagacatacctgggttccagccttggcacggaccagctatgtgaccttgggagcttcgcgtgtcttccaacctgagctgctttatttgtaaaatgggaacagccttgtggagttgagggaaggatttggataatgatgggactacccaggtgccttgggcctggaggagccgtgggcttgtggtttagcttggatgcgtgtggttagcttagagaggactatccaaatgccttggggctggaaggagccgcgggcttgtgggttagtttggatatatggggttagcttagagaagactatccaggtgccttgggcctggaggagccgcaggcttgtggtttagcttggatgcatgtggttagcttagagaggactatccagacgccttggggctggaaggagccacgggcttgtgggttagtttggatgtatggggttagcttagagaagactatctaggtgccttgggtctggaggagctgcaggcttgtggggtgagcttgggttggctcaggttggctctcctgccctttggatattttatcagcactcacatctctgcaccgctagcccattctgctcagtgatcaaataaactggtggacctggctggaattcacacccaatggtgtatgcatttaactgccttcctcaagggcttttcacacatcaaaaggtgttaaaatcaataagtagccttgaggttttttcttctttgaaagtaaatatatgcatgatcttgcacttggtcaagctcacccgtcctggcattgggtgcttaggagtcccagtgaaggaagccatcatcggggaaacgaacaagccattaggctgcagaaagacgtcagaacaggtgcagcccgttaatttcatcatcactgagcgggtccgtggactttgctgagacaaatatatctggaaagaaaacactgagggggcaggggatgggaggagactgacatgaattcagaggttgttggctggggttgcagttttatttgctttttgaaatagtgctgaccaaaggccctgaagcttattaagaatccaggcagttctggaggggggcttggcagcaccacgggatgggcatggggagctatgggtggggaggtggtggaaggagactttcccacaaacgaatccatgagaaggttgattgagaacacggccacgaaagcaggggtaacggaaggggtgcaaggagaagagggaacctcgccctgttggctgaataaagtacaggaaaacttccatgtcaaaatgtttttcccctaagggattcgctgatgcatttcctttttagaaaagggttcttttctgctctcgggagcttaatttcattcggaatgaaaaatgacgagagtgaattggaccagcagcttgtacccagcctgaactgctggctcaatgcgcttcatgtttatttagctggaagcctggttgggaagtcattaccttcaccaatgcaaagagaataggggtgtggggtgggcagggagggtcactgcacggggatgtggctgcagggccggccgctgacccagaaggggtcctggaggagcccataagaggcactgtgcaggggaagccacctctgccacgcatccgcctggaccccaggcagctgtgttctctgggcatcgggggcctcagcccacctcttccaaacccagcacaaccaacacaacatcagtccaaagtgtgagggcagccgcaggctgggccagttcctggcctgatggaggctggagaaagaggctggtctactggacacccacaaaacaagactgaccctcagctctgcctggtacctgcaaagcagcagcatctttgaagtggttcaggtttgagccacccagccagtggttctcactgtattttagctcatgtgaggaacagaaccaaattgaaaaggggaagccaccagcatcacaggcacacaatctgagtgattttgttttcaaggcaggcctggaaagttttcattttcaggaaagaaatcaaggcgggggcgggaagaaaacgcttgctaaagccatcgatattttgtcatatggaacaggagcagcctccgttagtaggttttgcttccttcgtggtttcgtgttcatagcttctagaataaatgagggagacagaagtctgcctgtgctaaggtaatattcctatgttccttttcttttttttttttttttttttgagatgggagtcttgctctgtcgcccaggctggagtgcactagcgtgatctcggctcactgcaacctctgcctcctgggttcaagcaattctcctgcctcagcctcttgagtagctgggactataggcatgtgccaccatgcccagctaatttttgtatttttagtagagatgaggtttcaccatgttggccaggctggtctcgaactcctgacctcaagtgatctgcccgcctcggcctcccaaagtgctgggattacaggcgtgagctatcgcatgtgaattcggtctagatttaaaagtacacggaatcatggtgagatttgttgtgtgtgcttgtgacaggtccttagagacctggtgggaggatgcctgggcagcccaggacctgccttttctagaccctcttgttggcaacactcctcccgatgtcagacccgagtccttgcccatcatgcagagcggttagtggctgtggcagctccagccatcctgtttctttgtgctttgttggatccatcgcctagaactctatgactgcttcaaaaccaactaatttccctttgtttgagacatcgtatcatttgcctgtttcagtacttataaatggagatgccttctccaggaccatcgtaacatttgcctgtttcagtacttataaatggagatgccttctccaggaccatcgtaacatttgcctgtttcagtacttataaatggagatgccttctccaggaccattgtaacatttgcctgtttcagtacttataaatggagatgccttctccaggaccatcgtatcatttgcctgtttcagtacttataaatggagatgccttctccaggaccatcgtatcatttgcctgtttcagtacttataaatggagatgccttctacaggacagttgattctcatctgggccatgtttccgtgagcatcggcacgagtggacagtccgtttccaatgcagggttgctgaagagaattatttatgaagtctctgaaccacttggggttcagaaaatattttgggaagagtaaaacctaggttacaatatttaataactttcttcaatgttttgttattccaaatccacaacccaaatgttttggtttgttcagaaaataacagcaacaagaaagtcataaaaaatagggaggagagtgcgtggtgattgagacaggccctcatgggagctgaaggctcagagcagtcacaaggagatggctggaagcaggcttgggggaagagactcgctttttttttttgacatggagttttgctctgtcacccagcaggctagagtgtagtggcttgatctcgacttactgcaacctctgcctctggggttcaagggattctccggcctcagcctcctgagtagctgggattacaggtgctcatcaccacgtccgggtaatttttgtagttttagtagagacgagatttcactatgttgtccaggctggtgtcgaactcctgacctcaggtgatccacccacctcggcctcccaaagtgctgggattacaggggtgagccactgtgcccagccagccttctcttttatgactgccctgatggactttggggtcatgaaggggctggagatggcaagcttggggcccttcatcctctggccctggtgttcggagagaagaagggcagacacagaagtagacctcgctttgtaaatggtcatggattcaaaagcttgtgtggatatttgcagcctgtgtgacacctggcaaatgattccactccctgtgcctcagttttccatccacaaaatgggagtggtgctacctgccttgcggatgtgttggaggatgagaaagaagatgcttgaaaatctccttctacgacgcaggcacatcgcaaagaacagccaaccctcctctgggctgtaaccctctcctcgctcctgcactgagaagctgtcagtggcgctgtcccccctttctgccccagccaggtggatagacaagctgcagttaatatgcccacaagaattcccatttgctctttcctgatttcatgccatggtcagctaatgaaacagacctgttgatgaaaagttccatgtggatgcaaatggtactagttcataaccatatattcctgctcatttacgtgatacacccagagatgttgtaccttcatttctgaccatcttcaattaacacaggctccacatactgtagcatacaatgccctgaaacctttccatcaagtaggtaaagatctgtaaaccaatattgaaatgcactagagaagctccatcctacaggaatcctgctgtgagtccctgtggtttcccgaagatccactgacagtgccagaaaccacctgctcctttatctgctttgataaggctgcattttcatgcattggtttttgttttgttttgtttttttgagatggagtctcgctctgtcaccctggctggagtgcaatggtgcgatctcagctcattgcaacctccgcctcctgagttcaagtgattctcctgcctcagcctcccaagtgtctgggattacaggcgcccaccatcatgcccaggtaattttgtatttttaatagagatggggttttgccatgttgagcaggctggtcttgaactcctgacctcagatgatccacctacctcggcctcccaaagtgctgggattacaggcgtgagccactgcacccggcctgtgcattgggttttgttcaagtgggtacatctgtcctacacagaaagtcaatgggcagaatggctgctggcttgagaccattccactcagatcagctggcactgtgaccttctagaagctgagtactggtgcagagtctattgcaaataaatgtccctggcctgcctctccgagcccttgtgaggaccctctgacgtcatgtggctgccttgattggcattgcagagattgcttggctcccatgtcatagtggccacctggaactttctaggactttctgccccttagagagcctggtaattcctggcttctcactgcaggttttggactcagtggagtgaggccactttctccacgcccccggctgccatctgcagttctgccccagaagtatagagatgactctcctgtccccatcccctcctccatcaccaaatcaccccagcacttctctccccctgcagcctgctcccaaagaccagcaaagcctgttgaacagaaaacgctgagatgggggtgcttcacgcccggcccctgatgcttattaactgtgcagggagggtttgcccatccctgggctggcttcctcctgatatgtgacagagcttaatacgctgcggctcccagcctcgccagccaccccgagagagctgcatttcacaagccttttgttaaccccctactgggctgattccgtgactttctggttcttctcccttggtgttaagaatgggaaagggtagggccctaaagaggatggagccaggctgtgcgttaacatagaagctggagagggaggtcccacccatagacctgctcactgagggaagacggaggtgcccagcaaggaggtgcctgctgaggacgccctggtgccctcctcagacactgtcagaagcctggtcccacactgtgggctgagaacgctgtagggtcagggttccctaatccaccctatgtgcgtgtcaagtgaggtcctgtggccagagactctgagaaagcagcatgaagccaggcacagttcactagcggtgcttcccccacatcacagcggccctgacgcagctcgaggggctcacaccggggcaagcaggatagctttacccagaggacaacttgctgttggcagaccagtgacagagccttttgtggagcaaagggtgctctttttaaggggacaatcgcttcttcaccctggtgctctgagtgtgtttgagaccctctgctcgctaaggcgaaggaccccctgccttactgctcccaggtgcgagaagggctgacaagtgtcactcccacttggaaagcaccaatcttccctgacccccatagcactccccacccacagggggccctgggtgcagcatgtctgtgcaaagagggagggaaattgggtttcaatggattcgtttttcctcttgagtaggtttgcattgagtggggggtagagtggggtgttgatccgaggggttgtcacatacgccttgaccttccagctcagtgtctccccttgctgctgtccaggagctccatgacatgctcagcaaaatccacaacgtgagattctccaaccagtgctctgggcaggatcagacccactgatgtgagaccggccaacaggcagctgggccaggccagggcaccagggcccctccccaccctgagaatcggggatcctgaggtgacctgtgccctgtgccggcactgatgaggttggcagggaagcttaaagaaagaagggctcagccatggctggagggacagagcccacaggggtccaggcaggttgggctccccggtctcagaagcttcctggacaccttggcctgtgctgaccgcctggcctccctgcttctggaatggacgggctcatgggacgtgtgctctgacctgcccactgtttctcaggattgtcacattgcggcacgtcgcagacagtgagtgcggctgtgcatgggacgcgctctgccagttaagtcgggccattccgggcgctgctgcaacccctctcgggctccacatttcactcccacacacaaagtcttaagtccccacgaggccctgcctgctctgccccagaaccctccagattccacctctgagtctcaaatgccaaaatgccaccttctcagtgaagcctctgatctcctccttcccttctctgcaccccgggcctcagccctgctcccacctgatatgcgacaaatcataccacttgctggctgcccgtcccctctcggggccagggaagctcaccaggacagggcttctttggaagtctgttttgagaaaggtgatccctgcccccagataccacaggccaccagggaggacggacgggcacacaaatacttgccatcagagagcggagatagatcccatctgtctgctcaaagaaagtcctcccatgactggaggagtctcctggccttcttctgcaggctggacttcctggtagtggggcccgataaccactgcccctttccattctctgcagccccccccagcccggcttccagcccctccatcctggtcagtctgtgggcatgagactcccccactgcaaaacgtgatgggcagtttccgtccttaccacgtctctccccacctcctgcatgatccctcgcccgtcatcccagaggctctgccctcagcttcagtggcccacactccagcgaaatcccagggcctctttcccctgggcctagcttcagttcactggtcttctcaccccacagcgacatgctctcctgggatgatcttatccatctccacgtttcatgtcccccaaaatataatgacccccccaattgatatagctgaccccaataacctctctgatttcagagttcatcagtgaggtaatagggagaagtagagtgttctaggcagaaggaacactgcatgaaaagcacaagttctgaaagggaaggacctggctcctgttggggacagagttgtttagcatggatggaatacagtagcagggaatgagggggtgagccccagggactggggtgggaatcttgcatccatggggacagctggggggagtcactcacagctgtcctcctgtcattatcacatttggaaagtgacctcaccagaacctgtcatctctaaccttctgctgctccccagatcccaaaagacacgcccctatgcagagccagggacaccaggcctctccaatacgttccgcacagcctctgcccacgtcgtagtctcaggcccgagtcggcgggttaggtgtggcaagagccatctggagccctgtggctggcccaagcttcagtcccttcaagccagagagatggggaaggttagagtattctccaaaactcaggcctgtttctgccccggcccttagtgtcgacacccaggaccagctttgtagaccagtgagcactgggacccggcagcctcgccagccatcagcagccacagaaggaacccagtacccagtccccatcaagcccttgactggcctttgcccctgacttcagagctgaggtccccagaaattatctgtcttttctgtttaagccacagcttcccctgacttcttccttttgtgttggtgacagcccagggactgtgctttttccagacacgatgttaactctctggtcctacttcctggctcaggggacagccctttggggctttccccctttggcatcatctttaaagctgcttcctgcactcaaagctgcctcccagctcctggcctctggtttagagcttcccccagaaagtggcgtattttatctttatgtgtcaggatttatataaaaaggggatagttcaactctaaatgtaatgagttggaagaacagctctctggtggctttctgtagtgaacatgacatcaataacattgattgctaaaaataactaataacactgggctataactaataacactgggtggccagggactgctccaaccctacccctaaaatggatgaaagggaaacaggcccttgcctccaaacagacacacctccaacaggtgagttcccagagggttcagacagaaggtggaggagaagcaagatgcccagggggtctgaaggggtgagcagaagtttttcaggcactggaagctccttggagggcaggcaggtggtgggagacaagcacatgctgtaggggggtcctcacataccagtgtgagacacacatgtctggaaggggaaccttctcaagctggaggaggcatcatagagccttgtgaaggaggcctcttgggaggcccatgaagatggcaaaggaaaagggaaggaaggaatgagaggcaggatggctcgtggctaggaatgcaggctctggggtgagccagctgggttggagtccttgctagctgtgtgggcccgggtaagccatcgagcctctaagggcctcattttccccatctggaaagtagagattcgtgattttccatatgctgtgacggtgtcatgggcttcccatgaggacccgaaagcacagcctatgtgtggctcttcgcctcatgcctggtgcctgggaagtggttcaacacatgcctgccgttgccacgtcccttctcggtatagccaagggaagggctctgagagctagcagttagcaaatggagtctgaggttgacccacgtgacccttgctaagggccttctgaggtcaggcccgagggaaataaatgatatttaggatgaatgtttaccaaaatcagagaagcaatcatttctgacaaggcagacggacaggcatagttacatacatctcatcgagcctccagaggcttctcctctgggtttgctgactggtggctggagaggctctaccttacacacaaaatcaattcttccatgccctcagccctggccactctgcccttgacaccctggctgcgttctcccagaaatagctgtgtgcttggattggaatctgctggggcgaggggcagctgcagcaggcagctcagctcagctcagcctgcgtggctctctgcctttctggaaggattagcttgcctaacctctcccagtgcttcccacccctctcctgggactttgggagaggaaaggcaaatgaaaggtgtggtgttgggggctggaggaaagaaagaccatgataaaatgccagcctgcagttgaggaagaaagttatttagtgggtcaaaaatgagtcaaagtttatagagaagaaatgacatgttttaaaattaatagcataaatgtcaactctgatggccagggcattaaaccataggatcaatggagcattctttgtgaggttattttctctctcagatgtgccctgggtgtggggaaaagagcgagagctcgctctgcggtgccacattttggattctggggtagctccatcagctaggttacagtgtgagagataagaaagttgctatgaggctgtgttcagttggctggtctgcatggagctgacattaaatacagtaggaatctgcagccctcggcttcaagtgtggggatttattgaagtcttgcaaaagctcttggtcagggatgctcctcccctgggcaggaagaatggggctgagggcacactcagaaccctgtgtcatgcatccaccccttgagcctcacagtcccttattgcatcagtaacagggtctgcagagccggaatggctcactgcccagggaggcaggaccaaacagggagttttctctgaagtctgccttgatctctgttctcagggacaggcagcagtgtggaagagcccctgcgttcacagaacacagagagtacacagcccctctcccctggcaactcttggagcctttctagatgacctcatgtggttcccctctgttcaggagcaagcaagggaactacctttgcaggttggctatgagaaactagggcgccacatgatttagctaattccaacacaaaagcttcaccacggagctgaaccttgaatttcacaacgcccaagtctcaatcctgggttggaggcatgggtttaactacagccagcctccacccctacttagatgctgtagcttaggacccccaaagccagccacggagctctctcaccaatttaccccacccctcattccagggctttctctggtgatcagtattttggggttgctctgaattactatgaatcttccagtaatcatattgtggtaatagaggggttgcctgaaaaccacaggaagccaggagatgcctggtgccaggacacttcacaggacctgaagaacagcttcaggtgaggactaagagcaaaaccagggtaaggaagggcagagaaaatcccactcgtgtgcatcttcacagaccccacgagtgtcaggaccccgcatgcctccagtatagaatttattctattgtgccttccttgtctccccactaaccaagagcaaccaggggaccagtgctgtctccccactaaccaagagcaaccaggggacaaggggactgtggcaccagtcactagcatgtccccggcacatggaaggttctcaatgaatactggttgaaaaaaggaattaaaatgttagtctataatggaacatgtttacactcacacttacagttggcactgtacacacacacacacacatgcacacacacacacacgcacacacacacacacatacatgcagacccagtgcactgcccttagaagtgtttgatgctgcgaaggacagcatgggctgctttcgctgtgtaatgagggaacagcagtatgccaaatgcttagaagagatccttttgctttctttcctccgctcaattctgccgctagagaccctactgttgtattctgatttcaccaacatgaaactgcatttgggggaaaaaatcacccattccctttatattaggaaagtaagaagcaaacagacttcgttttggaatttggcctttgttttgggagttggtataaaagacaattcctccctggaggttttgctttggttttatggggtttttatacctgcccccaccttccatcccccttgaaaagaggcccctgaagagtttgcttggctggaacatcacagaccaaagtctgagaactgcttctattttacagtgccactgttagtaatgcctcatatgtatattatatttcatagtttttcaaagccacttaaaagtatggcctcatttgacccttccatcagacctagatggtcaacagagcacatctcattatctccgtttaacaggtaagaaaactgagaatttagagggtaaagtgacctgctcaagcccacatggggccaacaaaaatgttccaagttactcatctgctgctcacatcaagaccgatctttgcttccttccttccttctttccttccctgcctccctcccttccttccctgcctccctcccctccccctccctcccctccctttcctttcccttccctcccctccaccccttccttccttccttccttccttccttccttccttccttccttccttccttccttcccttccttcctgtctcactctgtctcccaggctggagtgcagtggcacaatcttggctcattgcaacctccaccttctgggttcaagtgattctcctgcctcagcctcctgagtagctgggattacagacttgcaccaccatgcctggctaatttttgtatttttagtagagacggggtttcaccatgttggctgggctggtctcgaactcctggcctcaggtgatctgcctgccttggcctcccaaagtgctgggattacaggcatgagccacttgcccagcctgagccattcttgctttagataacctgctgctttgggggctgacagataagcaggaaggctgccctgtagcagcggcaaggtccacaaataagccagatgaaggagaagagaaatatagggaggctgtcagggactcattctggttaggatttaagccccagctgctattacaggatggagagatgaaacagggccgagaaagagcctcggccagcatggggtcaactagggcaggggaagcaatgacatagtctcacagagtcacctgtccgacttccagagcaggtacagattcatacagagcaggtgcagattcatactgcagcctactatgctcttcaactggggccacctgcttgccttacagagtcagaaaagcaaagtgaaccagttttctattcctctccaacaagccgctgctcttccctaacagtttatctgcacttaagatccctcagcagaatcctggactggagagcaagttcgtcagattagatggggcatacctttcacccagttctagccttgagtgtctgtgccggactccggtagcagacaccttttgctttttttttgtggatggagtctcactttgtctcccaggatggagtacagtggtgtgatctctgctcactgcaacctccatcttccgggctcaagtcattctcttgcctcagcctcccgagtagctgggacttcaggcgcctgccaccacgcccagctaattttttgtattttcagtagagatagggtttcaccattttggccagactggtctcgaactcctgacctcaaatgacctgcctgccgcgactgggattataagcgtgagccaccacgccccgctagatacctttgcttcttggagaaacaggaaagatgcggaatgggggaaggcaggagttcagcaccacggacagcgacctgcgggtgggagacgctgccagccacgcggccgaactccggactgggggccacgtggaggaggccttggttcagctctgccccatgcctcacgggacacacatttatcacctggaaacagcggccagtgctcaggaaggctcatgccattgcggatctgccttcattaaatccaaagcatgattgcttgtcacttgctttaattcgtttccctcccaactctttatttgaagagctttctaaagttttgtccataagaggaagagattctcttttgggggtgggtgagaccttgttatggaagagaacagcggccagttcagggagtgtggtcttccacttcgatcgtgatgtgtttctgtgtcgcttgaagtctagcttgcctttcctaacgctctcggcccgggtcagagactccatgtgagagaagacggccacagggaatgtgcttggatttgggaatcttctcagaggccacggtttgacctggcaccagtggttggggcccataagccacgcagcacgcagatgaaatccgcctcgtgtgtcctcactaaatccacagcgctagaaatgcatttaaaggcaatcctgcctgcccacagcagattttccataccctggcaattggagcatgttaaggatgagacacagctgccaggtctgatttcttaaatcaagattcgttttgtagggagagcaggaggaaaaaattaatgcacaacctggcaaggtgagggagcgagggagggatgcctgccgccttggtggctctgtccactttgggtgggagccagttcctttccagcaagcgccttccagctcagggaagggcaggggcttcccacagacagcctgggatgagcaatgcctgactcagggtctgagtgcgggcaaagtcaggtgctgatggaaagatcagaagttgttggcttacattttgtttgatttgtttttctctgagttttcagccattctcaccacatcacacttggtttcctgtcctgccccaccgtcagctccccctgctcccccagcaccctgtgtccatcccacaaggatggatgagccaagctgctcaggcacagcttgagggtgggatctagtaccttcccttccctggctgcaaagcatggggtgcgtttgaggaagggtgagggcagcattgggagtggggactgtgcagtatgtttcggtctgtctgtggcagggcatggggaagggcggttatttgtaaataatacttaattgatgagacttaaataatagatgagccagcgtcattcccagtggcccagcagtactgatggccaccttcattcttccatttcccaattacaacagggtggggctgggcttgggggaggggtgtcaagaaggggatagaagagggcaggggagcaacggggtgaattagagacttttgttgcatttaatatcaattcattttgcaggctgctgacacagccaaatttcacagctctgaatttgtggggctccccagtgtacagacgcaaaaggaaaatacaaaagaactttttaaaaaatggcctgccatcagcaaaaaattaaaagaaaattttaacccccaccccgcaaaaaggcacaaacagacacacacacacacaccacacacacacacacacacacacaaaatctgattttgatttcttatatggttgagggactcatctcattacttaataatcacattgtttgccagagccgggctgtgttttgtcgctctatgggccgactttgttacacctgcatataaaaatgacaagtgtagtgagattgtcagcaaaagggacacactgaagaacaggcacagtcccctgactggaggagggtagccccagtctaacccctccccggggagccgggctcccaggaaaatgcccaacggaagagtccatacctggcctccagcctgggaggtttgcttcctccacacacaccagctgtagactctcccatctccctcctcttcctcctcccctccctcctccccttcctcctcttccttttttcctctttctcctcctcctgtcttctcctcttcttgtcctttctccttcttttactactcctctctgtctttctcctcctctccctcctcttttcctcctccccacttctcctccccttcttcctcccccctcctccccctcctcctgcttctcctccctttccttctcctcctctccctcttctcctctttttcctcctccccatcccctctctctcctccccctctccctcctcctcctcttcctcatcctctcctcctccctctcctcttcctcctccccatcccctcttctttctcctcctgcccctcctctccccagcagctctggctttttcctcctgatcttggccagtgtcttgctctgtgtgcgttcattttcttaaagtgatgcccaaggcccactacctgccttgtctggagcttggcagagcctcctcttctccgagcagccatgagttggggactggggtcacataaaagctgaataagaatgactcccagcaaacagctaacaccctggactcccatctagggacttagtgagtgctccttccatgggccccttgggatccagcctcccaggcaggcttatctatggccaaggtgcccctcatgtgagctagccctgtggagagccgtgtgcctttgggaagcaccaaagctggggtgctgctgcacatcccgggccagccccaagggtaactagtagagcaggtgagattcatctctccctggtgacatggcttcctcgggccatcccccggtaccactgagaccccttccaatcagcaatcccagggtcccaggagcaggctgggctctggcctccaggagaaagaagcaaagctgatgtaggacagacactggaaatctggcccagtgcctgccacaaagcaggtggccataggccagggcacagtgtgcctttcccagggagatgggggtcaggcccaagtcatggtttattcataataaacacagccggccacactgaccagtccataggtcccagcccacttgggggtggccctcaggaagttatgcccttggaattgggccacaggagcagatggggtgactgaggcactgggtgtttccccacctcactccagctactctttagaaattgttctaaacagttgagcagaaaagcctatttgtctgactatacccaaatggtcaaataataataataaaaaagcctatgaattaccaacaacgcgtgtgtctgggaagatgtaacgggtggtagtgtcccattctggtagcttctccttgtggagagttcgccatcaagcaaatacgaaacacatttgggttaagtcattggactcagtagcatcttagagcaaacagttaaaggtagatatgagccagttcagatctagcaagctcaggagcactggagatgtcttctggaagtcagaaaagcatctgcagctactttgcagcactccatcgagcaacaccccaggggaaaggagctatgtctgcatttaatgggcagtttattaaacaccaaataagtgccgggcactgtgaaggcatgggtgggggacaaaagtaaattgcaacaaatctcagcttttagctgctccctcctggtagagaagagactggaggcataggctggcttcacgatgggcgagcacagaaagcacagaggcggtgctgggagagttgtggctagcttctccgggagaggacacctggattaaatatcagaagacaagcaacctttgactaacaagggttttccaggccaagatgcagcatgaccaagggtgcagcggtcaacaagccaacgcttcacttgatggagagggtcaggaagattctgcggccaccaggtcgccaagtccatgcttggtggaacacggcacaccaggagaacagcagggcattgcagccccagaacctgccgaggaagccatctcaggccagtgatgtgtcagaaggtgccccctgagatccgagggtcatctcgccggcagggcccagctggggaagctgggggtcctacctcttgacactgcccccacttacacaccttgagtttgaggtgtcaggggtggtaggagagctggagtggtttctcaacaaatgaagtggaagagggtggagggctgtggtgtgggcatcactgcaacatgccactgctgctggatgcgagtgatgttgaccttgctggcaggacaagacagcagcaaacagactgtgctggtggcacgatccatcagggctgggtggcagcaccgggcggcagcctgctgatgcaaggctgggaggcgggagggcgcgagtctgtaactggagaggtttgtttggattcagcattgctgaaatcctccctggcagcagatgcggctggcctcggaaatacgggagggacatgggaaatgaactaataaataagaggccaggtgtggtatctcggtgctggcaaaacagaggccagagagggtgggatgtgagggcgggtcccattcctgaaagtaaacctggcaaaccctggccagcacacccagacacaaccccggatggcatcaggctcggttaggggctgagttttgtcccctcaaaattcctgtgttgaagtcctaaccactggttccttaaaatgggactgtacaggcagtcctctggatcttagagttctgcatccatggattaaaccaaccacaggtcaaaagtattagaaaaataaataaaaataatgatacaacaatacaaataacagaagtgaaaaaatacagtgtcattgctattttcgtggcatctacattgtatgaggccttgtgcgtcacctagaggtgatctccagggtactggaggatgcacgtgggttacatgcagaggctgcgccatttcctaccaggggtttgagcatcgtcagatcgtggggtttttggaactaaccccctgaggataccaacggacaactgtgtttagagatatggactttgaaggggtaatttggttaaactgagttaattagggtgagtcttaatccaaagtgactgttctcctgaagaggagattaggacagacgcaaacagagggatggccacataaggacatggagaagacggcgtctacatgccaaggggagcagccacatccctgcctccagcatctctgtttagccagcttctcagtaccccacacaggcctccaaaggaatctgccgacactctttttttttttttttgagacagtgtctcgctctgtggcccaggctggagtgcagtggcatgatctcggctcactgcaacctctgcctcccgggttccagtaattctcccaactcagcctcccgagtggctgggcttacaggcatctgccagcacaccccctaacttttgtatttttagtagagatggtgttttgccatgttggccaggctggtctcaaactcttgacctcaggtgatccacccaacttgtcctccaaaagtgctgggattacaggcatgagccactgtgcccgactcctgccaacaccttgatcttggacttccagcctccggagccacgagagaagaaatttccattgctggggccaccctgtctgtgctgtgttactgcagcccccagaaattgatacggatcccaagcactcaatattgccctgggaagcacccagaatccagtagagatgggaagaatcagaaagggaagtgggtgattccacccgaagtggggagatgtgatcctattaaattgctgccctaatttaaaaaaaatctctttgatttcttaataaaaatgaaatagagacatagactttgggagaaaaccctggaggaggggagaatctgtgtgggttaaataagcttaaacgtgaacaacagaaagatctaccagtcagtcagtgacagaaccaggaggctggggcaacgtggactggcgtgttcttctggaactgatggagagaccatttcggataaagatgatattgctgtgactattattgttgttttgcctgatgtgatgaactccccaggggatctagtttccaagccgacgtttcgagactctgggggacacccagacgtgaccctgtgcctctgcaccagagaccttggtgaggcacctggggctgcacttgtattttaagtttctagaaaagatgaatgggtcttgggagaaaatggacattccagtgtttccttttcagaaaattcttccttaggtggccacaaagcttttataaacaaagtcccaaacaggggaggcatggatgccagggctgacgcagggccctgactccggccttgactttgggagaacatgccctttttcctcaccatcacctcctgaaatcttgcgggccaccagatcaccccttcccagtcactgcacctcggcagttttaacatacgtaggccccagggagaagcctctggctaggagatgctcccctgctgggatgggcctgggagagcctcagaggccactctctgggtcccagcccatttaatgtatgggactttctgggtcccagccctttatgtcaagaaggactttgcacatgtggaccaagccctttaacaggtccagccctctggggctgcgagttgtccatctgggccacacccggacttggaaccccactggggtgagcggctaatagaacacaaagtctcccagggtgatgcagctcccataagccttgtgcagcaccagcgggaacactgccttggtggcatgtgtgttttcaagactgagaccacagaggtgtactccaaacattctggcgctcagagtcgccctgacaaggctccggccctgctcacctaaaggccatccacaggccagtctcacaggctctgcctttatgtgggagaaagcaggggaggagcacctcgctggaaagtgagtttcctagtcagtctatcttccatcacacagtgtcaagacagtcatgacaatgcagacccacccgcagcagcactactcccagtggccaaaaggggacagcagcccaggtgtccatcaagggatggatggagaagcagaatgcggttcccccacccatacgttggaaactatagggccttaaaaagaaaggaactcctgacacaggccacaatgtgaatgagccccgaagatcttatgctgagtgaaataagccagactcaaagggacaaatactgtgtgatcccactcacgtgaggtccctagagtcatccgattcacagagatggaacgcaggatggagactgctagggactgggggagggggtggtttctaaattggtggggtattatttaatggggacagagtttcagctttgcaagatgaagagttcaggagacagagggtggtgatgtttgcacaacaatgcaaatgcacttataccactgaactaaagatggtcaagatgttagcttttgctctatgtattctaatataatgaaaaacaaatgtgaacagacatttgcacccactgagctctcactgcatgccgggcactgtgctgattccttcacacaataaataaatacccctccccttccatcagcagcccttcaagaagcatattattgtcccatttcatggataagaaaccaaggcttagaagttaagtacacgatccaggatcactcactagtaagacggagccagggttccacccaaatgtttctggttcctggcaagcactacagaaatagacagtgttggccaggtgtggtggctcacacctgtaatctcagcactttgggaggccgaggcgggtggatcacctgaggtcaggaatttgagaccagcctggccaacatggtgaaaccccttctctactaaaaatacaaaaaattagctgggcgtggtggcagtcgcctgtaatcccagctacttgggaggctgaagcaggagaatcagttgaacctgggattgcgccattgcactccagcctgggcaacaagagcaaaactctgtctcaaaagaaaagaaaaaaaatagatggtgaaagaaatgagtgagtgaatgaatgaatgataccaagtcccaggcttcatataccattgaacttggcttgttttgcaaagtttttggttggtagtagttgggatgccttttaaaacaaaataatatttaaattattcccaagtaaggggtttgactttggagtgatggaaatgttttggaattagacagaggtggtgaatgtactcaatgccactaagttgttcactttaaaaggtctattttggctggaagcttacgcctgtgatcccagcactttgggtatgtaaggccggaggatttctcgagcccgggagtttgaggctggcttgggcaacatagtgagacctcatctctacaaaaaaagatttacaaaaattagatggttttgatggtgtgcacctgtggtcccagctacttgggaggctgaggtcggaggatcgcttgggcctaggggtagaggctgtagtaagccttaatcacaccaccgtactccagcctgtgtgacagaacaagaccttgtctcaaatagtccatttatgctatgatttttaattcaccaaattattttagaaatatgtatacctgaaattgaatataaatataccagaaatatgtttactgattatgcggtatatggttgcacaaatatacacacaaatgcttcgcctgtggacagcatcgtctgagtggtcttggggaagtgggggtctcaggggtcttcagctggatttgttagggcaaagatgctcaccaccttgtgccccctcaggtgcggagcctgcagactctaacctgcaggccagggatttgggtctcttttaagcctgattttattaaaagtcccctgagcattttctcttctgaggtttgtctgcttgcctcctgaaataataagtcacatgggctaggggcactgacctgcccagactcatcaacatctatttccctttatcttttagagagaaatgatagtttactccccgagaatggttgctaggggcagaccatctgataaatagatgtgattaataatgaattaattaacatcaccttccagctgacaatgaagagaagcttccacacactaggtgcacgtacgtgtgtgtatgtacctgcgtgtgcggtacacagtgtgcatgtgtttgtatgcatgtgtgcatgtctgcctgtgtgtgtgtgtgtgtgtgtgtgtgtgcatgtgtgtacttggccacacatgcatctggaggacctgggaaagacctccatgagggaaggaacatgaagccagatgcaccacccgctatggagctgcctgcgacttggggttttacccattataggaagttaatgccccagggagcccatttctcacagaagctctttggagtgtatgtttgcagtctcctttataatgtgaataatcattttctaactcctgtttggaaaattaatcttctagtttcttagagtgtagcatagagttttggaaatagggttggtggttaatgcctgtcttagtacttgcaaacaggcttgagggactggttatggtttttctatgcaacagaatgatattcaatcatgaagaatgaggttaatagcaacctataaatatgttcctgagaatactgtctagcaacaacagcaagttacaaaacaaaaaatatatatgtatatatatacacacacgtaaatatataggtatatatgtacatatatttgtatataatgtaaatatatgcatatatgtacatatatattttgatatatatgtgtatatatatataaatatatagcatgatcctgcttttgcagaaggattttcatactcttatgtgttaaaaaaaaaactgctagaagatcacacacatcacacacgcactgaggtgtgagctgtggttatttctggcagattgttacttcttcgtttttcttgtctgtattttccacaaaaacatctattgcttgtgtaataataaaaagatactgacctgactttaattgaaaaagaaaattattgattttgctgaaagtccccagacccttctaaccccaggggagaaaagatgatgggattagaatgaaagaggatggaagtcaaacccggggcctctgttcttggttccaactctaagattctcggaaggtgctggtggctgttgggttatatgagggagagctggccgtgacacgggtgccgtgttctcgaggcagagtcttgcttacacctgctcgtgtctgtgggagaaccaaatccctcacctccttcacttggcccctccctcccaccgcgtctcacactggggcattccatcattttccatggacgctatcctgagccccgtgcttagagggccgggtggactccgctgtggccctgctctcagaggatgctgtttcagcagggtgggtgggccgccgcctggccagggcaggaagcacagctctggctatttttagtcaatcatcaacccctccgatggtggccccaggtggctcagttcctgaagatcaggcagttgaagcagagccactaaagggttcttgcctgtgtgggggggaaagggagaggtgggggcagggggcttggaaccctgcggccggccaagccctgccgtcatagctattactgggatcagtttcatcctgcctttcaatcattatgtttttcttttccacccacccaactccccagaacagaatcagataagaaaccctaaaaaggtccaccaaataatcagaaaaatcaagacgacgcacagctgtcccagtggggcttgctgtttggtttcagagccacgtgtttccacctccatttcccaaggcagggcagagccctgcccccttgtccgcctcctctggacagaccgacatgaaatgggctcggccgccccctccagtgagcccctgaacaggggagaaagactttggggaagtcacggtcagatctttctgcctctcctttggccctgcgtcttcctcccacacagcctgtgtgggctggggtgggggctgtaccagctacacagctctgagctgaacaaactcctgaaagggcagggagcctccgctgggccatttttcagactttaattgcattgagtgaaacttaaaaaggactttccgtttgctcaggctgaattccctctccgctgtgggcaggcagcctccctccaaggagagcagaacaaccagcagagagtgcataacctggctaaccatccagggctgacctgccgtagcctctagcgtagagccctgggcagcagttgtgcaagccagtggatggaggctgcccagactctgccgtcactggctgccctgctagagctcagctagagtcgagtttcataaaagcagcagcgtctacagtctgcctttatgtccagcgggtgaaagccagaaagcacagacggaatctagccgatagggctccatgctctgcagaaaacatcctgacccgaggcctgcaggcggcggctgctgcagccagataacgccagcctgagcctcagctctgccagttcccagctgggtggccgtgacctccctgagccctgctaagagcacccatgcacggcaatggcggaaaataaacgagacggggctgtgagacatctccccggcccacggcactcagcagtgctagctgacaacgcgccaggccagggcggctcacacgtccatgcagagcgccagccatggcccgcacgcgtgtgactctcttggaatttggctgatcaaaggaatcagtgcaacggagcctgctgccagcctaccctggcacacctgccctcaggagcgcccctcccctccctgctttgttcctggggctcccttctcttactgtttccaactcaggctaaacaattcctgccgcagcctctgagcctgggagaggatgagggtggggtcttcctcaggggccatcccgaggccacttcctccctttcccttccatgctgctgagttggcagaaggatgtgagagggtgcaggcaagaaggaaggtgccagaaggtccagggtgccctgcctacctccctctcttggctgcccagataccaacagccccacctgagccaacctcctaggcctcccgtgccgggtgtcctcctccacccccagctccacgggcacctgggagagctttgccatgcctgatcctcagacccgccagcctgggcgttgggcctctgtcaggaggaagatgagaggctgggggaaaagggaacccctctcctggtctggggcccgacatccacgactcttggagagtctggccccaggccctctgagggagttttctttgatatttattaacccactttctctcttggcactcggagcaaggagggaaactcagccaaggctattaataggctaaggccatccctggggagaagaatgagctcatacctacagcacaggtgccaagtataataaaggtttccgactcaggcctaaatataggctgcggccacctcggggcgcggaaggagggcctcgcatgagcagcgtgtccgccctgttgccatccagctggccacttgggcaaagctttttgacacctgtgcccgggacgagctccaccgggagatcttgcggtcacacggtcctgttccaccctaggtcagccccggtgggagccacccaggaggcaggggaggcgaaatgacatttcatttatattaatgactcctgtaaacagagagtttaataaaaaggcagtgagggaatttatgggcaacccaaggataattaaaattatttatctacttacctcccttgcttgctgatcagtctattaattatctattatatactcgctgatttgcattttagtgaagggactggggaagggcaggtgaaaagcacagaggagttagggaaccccatggtggggaccctcctctctgcagaccaaagctcctcctgcagacaccctcacgcatcgttccccatggcggtgggccaccctgaggcctgggagaagcccccatctgagaaccagctcggggggagcagaaagcattgcgtagagaggttggttcttacctgtttgcagagggatggctccaggagcaggttcccagctggaggggctgcagacctgggaaaatggtggcagaatttcctctggctgctgtgacttcaagctgcatttcaaaaagaaaacaagagaacaaaacggtgttcaatctctgaatatctagagtgcatcagacgcatgctctcccgcactcttgattgaaaatattacaggacagagtgtcacgggcactatgtcttttgaacgatacaaacaggaatgcgttaggctgggagaagctgtaagaaggtgtccctgtccaccacctcatgggtagaagatgctcccagctctgcagccctggatattgtaggtgagactcacggtatcaaaaccgaagctggggtcagaggggagagtgccagcaggtgacggggtcaggctggagtttggactgacgggggaatggccgagtcgcctgtccccaagccgggccccaggtctctcatgccagcagagcctccttggggatgaatcctcagcaccaggcccagctcctgggcgctgggctgcatcctagaggaaattgtaacggccggcgtgggttgagcagccctcgtggtttgtacttgcagcctagctaggccctcgatgggaagtaaggctgttttctcatcagaccccatcagtgtcaccacgagcagctgtgaattctccttcttggtcttaggcttctctggggttgacagtgtgaaggcctctggccaccaggcctccctgctagacactgggtgggggcaacgtcaagggggcacctggcttctgcctcttagcggctcactctgccgatctgtgttggctgtgagcagggactgagtctgccatggtccgagtgtttctgttccctcaaaggccaaatgtgatggtatttgaaggtggggcctttggtgggggtcataaagtcatgagggtggggctgtctgaatgcgatgagtgccttcataagagtgtctgtctctctctctctcctctctctccacccacccacccccaacccccagtgacaatacaccagatctgctggcacctggatcttggatttcccagtctccacaactgtaagaagtaattgtttgttggaccgggtgtggtggctcatgcctgtaatcccagcactttgggaagccgaggcggggggatcacttgaggccaagagttcaagaccagtctgacgaacatggtgaaaccccatctctactaaaaatacaaaagttagctgagtgtggtgagtcctagctaccagggagtctgagacaagagaattgcttgaacctgggaggcagagattgcagcgagctgagatcacaccaccgcactccagcctggacaacagagcaagactctgtctcaaaaaaaaaaaaaactaaatgtttgttgtttaagccacccagtgtatgacatcttgttatagcagccccagcccactaagacagagcctcacgtggcttgtattcctcaaagcacctgagagtagattttgcacaggaaggaggaaggcagacagggcaggaagggggtgtcacatgattggggtctccgctgaaactttggactcttcctccctccacctctcctgagccttcctctcccaccccgtggctctggccccgtgggcactgccccatcccctgcatgtgccccgccccctcctgctgcttctcacacctgctccttgctccctctgccccacccatgggggccttctggttggatttgacctcagggtccttgcacatgttgtcccctcctccaggtgttgggtgacatctgcatgttcaggcctccccttggagaagcccccaaccatcgtatgggaagccccctccccatcacctgccgcatctactcatggcctgtcgcatcataatgtggcttgactctgtgtccccacccaagtctcatctggaattgtaatccccatgtgttgagggagggacctggtgggaggtaactggatcatggcggcagtttcccccatgctgttcttgtgatggtgagtgagttctcgtgagagctgatggtttaaaagtggttggcagttcccccctcactctcatctcccgccaccatgtaagacgcacctcacttccccttcgccttccgccacgattgtaagttccccagacatgaggaacggtgagtcagtgaaagctctttcctttataagttacccagtctcaggtagttctttataccccacagtcataaagtagtgccatcattgtcttcatttgtgcacaacgccctaaaacggaagtttcccgaggacacgtggagctgctgcgtggtctccataccggagcagggcctggcaagccgcaggtgctcagggaatgaggaatgagggatgaatgtgtgaatgcacagctaccccggacgcggtgttccaactcctatttgcattccctgcccgcagcatggcctccatagcatgcattccccaacctgcccctagagtagatttttaaagcacaaagttgtttaaaatcccttgaagcttccctgaaggcctgggggttaagtccagattcctgagcctgggggtccaggcccttcacagtcagttttacttccttcccagggtcctctccccatgactggtgcaaacctcagccctgccagcctgcccagaccagggcgagacctcctctgtgtccccagagcaatctgtcaccaagctcgaggttcctgtagacttttttctgcactcctcccagtagaggctcccatgggcccctcccacccctctcttttctctcctacctgctccccagccccgtcctgcttctaggacagtcagcagtggctgcccatttccccactgctgagggtcctgtcctgtcggcgaggtggagctcctgcaggctcacagaggagaaggacctccaccctcctcccgcattccccagcctctgcccgggcccttctgtggagggagcaccgctctgttgctcaccgatggcacagacaagtcacccccagcgctgcctcggcattaaacatctaatgcaagttaggagcccattttccataacacacagaaacattgctgtttccaggagttcactgccctctaggcccatccattgaaccctggtcatcagctcttggggtctcggggcatctgatggtcagtgttatgcgtccacttggccaggctctcgtcccctgggattcagtccagcacgtacctaggtgttgctggggtggtacttggtaagtgtggctaatgcctaaaatgaattgatttcagcacaggatatggcctttcttaatgtgggtgggtgggcttcatccagtcagtcgaaaggcttcatccggtcagttaaaaggccttaacagcaaaaactaaggttccctggggaaaacattctgcctcaagaccgcagcaccagctgggcgcagtggctcacgcctataatcccagcactttgggaggccgaggcgggtagatcacctgaggtcaggagttcaacaccagcctggccaacatgtcaaaaccccatctctattaaaaatacaaaaattagctaggcatgttggtgggcacctgtagttccagctacccaggaggctgaggcaggagaatcactcgaacctgggaggcagaggttgcagtgagccaagatcacaccattgcactccagcctgggtaagaagagcgagactccatctccaaaaaaaaaaaaaaaaaaaacagactgcagcaccaattcctgcctgaggttccagcctgtccacccatcctacagagttcagattcggcagccttcgcaataacatgacctaattccttaaaatctgtctgtcctatctgtcaatcaatcaataatcaatcaatcaatcatctacctacctacctaggtcctgttgactttgtttacctggagaactctgagtcaggccctctggggtctctcgcaggttgggctcctggagctgactctgtccatcaacagaaccagacatcccacctccccatgctctgcccagcatgcagttctggctggtggagtgggaagcagtgcccccatgatggcagaaacggggaacaggaaggaggcagcccaaagcctcatgtctgcttgggggcaaggacagcattctcacgaacctggaacaaaccggccctcctgaatgtaaggtcaggcgcggctgtgatgaggacaacccaggtgccagcttcagctcgggcctgaaaatccctccccgtcagagctgacatttcaggacaggcatctgccctctcccttctcctcccccttcctgactatcatttctcaattctgatgatgtatcaataactgcaaagcaaaatgccacagttagcagcgctaccgtactgtaactaatcgttttctgaatcaattctcagggttgtgtgtgcacaacgaggtggggctgcatctccaaagcctctgcagcctccaggaattaggcacaccaggagaagtttcaggagacaaagaagagggctgggaagaaaaagggagcaggcaggggagagacaaggaaaacagcagattaagaaaaaaaaaaaaagagggcgaagggagattctcaacaagacagagagccggtggcagcaagccatggcctgacccacctttctagggtgcagcagagatgaggaaggggctgtggtctgagcacttttgatgggatgaggtgtggtaggcaggaggcaggccaccagatgcactgtgagggcaggagcatgagtctgccaggcgctgtcctgtgctctcggaatgtctgagtgaggatactaggccagaccagaccagggtccccaaggtgggggcaggtggtggggctggctgtcaggtgacaggtgccttcctgggaaggggacacaggggagagggcagactgctgtacacccacctgttccaagcagtaagaaagactcaggcccaggaaaccctccagctccttcatgcacataaaaagacctcaggggtctctggagttcatgcacttaagattttattggcttaataaactgtgctgctgctgcccgcaggtcttccttggcctgagcacatgtgaggatggaggggcagctctctgtagctgctgtaatctcctcgagggggagagagctggcaggagtgggagagaaaggacaggcagcttagacagggctgcagggccacagtgggaccgagggaagccctttctgcagtataactcattaacccttccagtgaccctaggaggaagctgagatgtaggatgctgggagagtctactccaaggcatacagcctgcatgctggcagagctgggacccaaacccagggcatctggctcaagagctcagcgcggcacctctacattgctcttgctctcactaaggtcagccagctgcagactcagtttccccatctgtaatgtgaactctttaatagctgccccccttgcttctggcaccttccaggctcttgcataccccactggggtgggaattatcaaaggggtagggcaggcagggctgggggaggctcgacctggctccaggggctttcttagtgaagtgccaaagatgggatggatgtcctcacaaacgtccagagcacggacctcccagtgaagcacagtgaatatagcagcctgggtccatgcctcacttcttcactcactcattcatgtactcattcatttagtcaagctgtgctgggcctgtttacctgtttccaccctgaggtctcaccccagacccccctgcaggtcccaggcccaaccatccagggctctggtcagtgtaggggagcagccacagaacccctacaatcctgacgagagtccagtaacacactcaggggagcaagggagagatgggcggggcgggacctcatcttttcttcctggagataaagtgaggccaggccaggcctgtgctccgtcatgggtaccccttgctcagagcctccccttcccacccccagatccttgggggctgtggcttcagccccgacctcccagcaaggctcctggggcagcagcatctctgcctcggggtggggggccgcttgctcccaagtttcagagcccaggtcttgagcccaccacaacccccacaagacaagaggctcccctgcttgtcctcccacctccaggagctactgtggggctgcaccaaataccttcagcctctgaaaagagggaggctgttcatcctcacttgcatgtccggctcttgcccgcaactgctgggagggtcctgcaaactggcctgggggctcaggtagccaggtggcctcagagggcagcgagtggtcacagcccccacatggtgtttcagtcacaggctcatgatcattcatggagggggctacagacaatggggtctaacaagaaagcccaaaagtttctgaatgggtcactcttgttgtttttttactaaaagggctttacgttttgctctaaatctttctgaggtgcaggctgctttcccgagtgacaaagtaggagctggggtaaccatggctccctgggagtgtgcaggacccccaaacctgctgagaagcagaggagagaggcatggcagtcaggcagctccaacaaacacaacacaccagagctgggctctctcgtgggcacagtgagaacgatcggcctcagcatcagtgatgctgggaggagactgagatcgcatacggagctggtgggataggcaggtgcagatggcctcgcaggacctggacaagatcggccactcacagccaggtccacgcctgagacaggagacagccaccaagactctcactcggcattctctgaaatagctgcactttgcaaaccactgggagtttcatgaatgaaagagtggacaaagaaaatggggcaggtttctaagtcagattctccacagtagataaaaggaacgtatcagaaacacaccagagctgcagaaaccatgttcagtcaaagaggtgagttgcaggaagaggccatgcatgtgcatttgaagaagacataaaacagtgtgagctctggtccacgcttacatgtgtgtataaatgtttttctcaagggacagaaataatagatgccaaatcgatgctcagagcggcctctgggtgtaggggaggggaacggggctgggtgtgctggaggggacttggactttgtctgtgatccttccttttttttttttttttaagactaatgcaagagaacaaagtgttagttattgttaattgcaggtagaggaggatagatatttatcttttaccttaattataaaaattctccaaaaattttttgagacgagcatggttagattgatggcccgctgcaggagtgagagaccctgattatacatgcgtgacacaaagctggtgtcaaagcacagtgttttctatgattagtggctctgtagaatctcaccggctggtggcctgacgaccaagtaaatggatgacgtacacgatggagtgattccggagggagccacttcccaagaggaagtaaaaccatttcatccctagtgatggcctccagactctagaccatccatgtctccaggaggtaggctcccctgcatccttctctctggggacccagaccctggtcttctgagcaaagcattctccataccgagaaggaggccagaaagtgctggatgcagaggcggcttttccctcttctcacaccaccatctgcaggccgacaaggaagtcagaggggacgtgaaaagagccacctctcccatcccccgacagatgggacccgcaggggtaggggaagagcggtgtctcccaggccgcgccttcacacttgctggccactgcggccagacagatgtgcaccctggtccttgctttgatctcacacggttacactttcagtgttacaagctcataaaagccacgtgatcaaattccaggtcattactcaaggaaagggacccctctgtggtcgacagcgacagtttcaaaccaattaaaataagcctggcgtttctgcgggctgccgcccgtgccgccaccctgggggtctctgagggccttgcttgcaatgagcaagatgcaggaaatgttaatggagacgcttaaatggcgcgccgaggggattctggtaaataaggccacgcggaaggggctggggagaggcctcccgagctaaccctggaggaaacttcaataaacacgagattggattggaaacaattcactccgcaaggggtgggtccgccagcagctctgggaggggtctttgggggaggaaagctatttcattccctattagttcccctttgcaagtatctgtgccccctgctgctggcactggaatctgccaaggctcgacagcacccactgagcaggctgggagcaccagggtataatttgccaagtaaaaattggagagggcgggagaggctgcgcggaagaggagaaggggtggctggtgatggtggagggtggaggggctggggctgaggacgaggccatgcagtggctttgtgactgtctggcaggtgctctgaactctgcaggatcctgtttcgggaagatcgaacgtcacccatgaaacaaacagagaagtttccagagaacaccaccccaagcccaggccagcatgtagatggggccaggccagcaggctgtggtcggtgctgtccagctcagtacagactcagggcccacctgagttgtgggcagccctccttgggcaggggcgatggctcccacctctgctcccagccagggactgttactcaggatgtgggcagctcgtcgctctgctcaatgcaatggaaggagctccaaacgtgagaaagggaagggaggtcttgagcaaaatgaggagcctgggccacacagcctgtgtccttcctcccagagcccctccccacaaggccaccacggccccagacccctgcacatctgcttttgtgggcctaatcttacagccgaaatagcaaacctcattccagtgacagtttccacatttaggaaataaaacccctggatatgcagttaaattagaaatttcagataacagataatgttttcattgttttagtataagttcataccatgcaatatttgggaagtacttatattaatttttcattgcttatctgatattcacatttaaccagtcaccctgtgtttttatttggcagccctagcttccaactgcctgattacccaggctaaacacacacaggtgcacatatgcctgcacacaagatatgcacactcacccgcaaatgtgcatgtgcacgcacacacacagatgtgcacggacacgtgcacatacacatccttcaaagaaaggagctgaccctccatgaagaccgacaaggagctggcatttcccatatgctccctcatggaacactcctcccatctcccccacggccacccccctcattcagacaaagaggtgcaggctccaattgccactttctcaaggccacacagtcagcatatggcccggctgaaattgcagacccagttcattcgtattccaaagtctgcactctttccaccaaaccagacccaatacatcaaattttagatgtttcttttcaaacagaacggccataaggaagttgctattgattctgcagtcaggccaatggccttggctcagacccacacggacctcagaacaaagacgcagatttgagctggtgaagcccccacgggttcagcctcaccagggttcacctgtggggctcagggtgagcacatctggcttccacacagaggctggtggtttgggtccaccctggagggttctgctggcaattgagtcctgagcaggcactggcagcagcaccgatgcccgtggcagggccttctagtgaaggggatgtttctcccctggacgtggtctcaaactcaaaggggacaaacacagacttgaaattgtctgcaaattggcaaggaatccctaaactctggcttccactaattaactagctgctttccaggtaactagtaggtactttaggcacttgttatgtaagaatcacaatcttaaaaaaaaaaaagttgcaatgttcgatgaggccatggtgaacctaagggtgccaccttgtctacctgggccatcactcggcaggcaaagagattcgatctggctggcaaatcttgttctttatgtgagcaggacaattctcaagtaacatgctaacttccctatcttgagttgtcggtttcatgattatttttctaggaatggaagttaagcttgccgcttcatcatttctagaaatgtctttaccccctttaaaaaaactgtctgtggattgggaaaaacctccagccccttgttactcaggcctcatctcctaaactgcctggctgctgctgacaaagttgctgagtagacagagcttacaactggggaggtgtcagccggagcccttgccatggtgatggctgattcctatcatgagtggaacaggagcattttgggcctgaagatctggatgctccgggtggtgtttgctcagccagcagccaagaagtccagcaaggagggaagaggagaaggaggtctgtgtgcttcacccaaaactccagcacggaggatgctgctgagccaaaacccaggagatgaaactgctgggggcagaggagctggggaggtctgggaaatacaaacagcagcaaatctccccactttatcttcatagccaccaccccttacaccatatggctccccctctcagcaatgcagttgagcaacggtctcagccataccatagtggtgagggtttcatgatttgcctaatgagaggtcttactggcaaatttcatactaagagttggatgttgaaatttgactgtggggccacgtgcggtggctcatgcctgtaatcccagcacattgggaggctgaggcaggtggatcacgaggtcaggagatctagaccatcctggctaacacggcgaaaccctgtctctactaaaattacaaaaaaattagctgagtgtggtggtgggcgcctgcagtcccggctacttggaaggctgaggcaggagaatggtgtgaacccgggaggcaaagtttgcagtgagccgagattgcgccactgcactccagcctgggtgacagagcgagactccatctcaaaaaaaaaaaaaaaaaaaaaaaaaagggatggagggagggatagcatttggagatatacctaatgttaaatgatgagttactgggtgcagcacaccaacatggcacatgtatacatatgtaactaacctgcacgttgtgcatatgtacccaaaaacttaaagtacaataattaaaaaaaaaaagaaatttgactgtggaaggagggaagacatgagggtgggcggagggaaaggaagccagcaccggatgtggctttcccggaggcagcccactggaaaagcggatttcattatagtcaggtggttgttttttaggtcacctacttcccagacggtttttcctgcttttctttcctgttacaaagttttgacatattggagccgggaaggaagaaaagtcgcactgtatcaccaagaagtaggggacccaggggctcagtgatccacagcagaaaggaagaggcgaggaaggtaggagatgcagagaaaggaaagaggcagaacgggggctcctgcaagtgcggagatgaagccctgtcccaggaggtcccacttgggctgccggagtggtgatgacccagggctcggcctactttcagcctgagaatcctgagagaaccccctccaagagcagcctgggcagattggtcttgtctgggctgctggtcttgtctgggctgctgggctatgtctgggctgctggtcttgtatgggctgctgggccagctgttcttatcctggctgctggtcttgtccgggctgctggtcttgtctgggctgctggtcttgtctgggctgctgggctatgtctgggctgctgggctatatctgggctgctggtcttgtatgggctgctgggccagctgttcttgtccaggctgctggtcttgtctgggctgctggtcctgtctgggctgctggtctatgtctgggctgttggtcctgtctgggctgttggtcttgtccaggctgctggtcttgtccgggctgctagtcttgcctgggctgctggtcctgtctgggctgctggtcctttctgggctgctggtctatgtctgggctgctggtctatgtctgggctgttggtcttgtccaggctgctggtcttgtccgggctgctggtcttgcctgggctgctggtcctgtctgggctgctggtcctttctgggctgctggtctatgtctgggctgttggtcttgtccaggctgctggtcttctctgggctgctggtcttctctgggccagcttatcttctttggtggcatgtgggaggcttgagtggctggtgtctcctgagactagagacctttccagaaggctgtggtggacttgcttcctgaccactgctggtgtgtctcctggagggagtgactggaattcactcctgcatggagccgctcttggtgctgaccctgatcccaagccaccagagggacctcccaggaccagaggggcattgctggcagtccagacccctaccagtgctggcagcctctgccagagacagatctgaacaccttggccatgcagcaggatcccacgtcgtgccacttggggcacagactggagaatgcccatctggtcatttcctgccttcaggcagtagccctcattaacagcttttggttctgtgaggatcagtgctattttaaacacttcccagcagggaaatccgtatacctgccctcccttggcaaaccctgcccatatctaaccagctctactgccagaatgagttcttcctcccatccctccaaaatcctttgcaacgaaaccacgagtctgtccccacattctgtttggagagtggctgctcaccaccctctgggcgttgccaatagagccctcaactaaaaccaggcacctcaacgcaggagccctgcccgcctgctctcggtgtgagtctgtcttccccctaaaaccttggagcagaactgccactgtttgcagcaaaaacaactttgaggtgctgttctaggtctcagaatcagagtccgtctgtcaccatcgctaacaggtagggggaaaacagattattcagcctcctgagaagccaccttccctgcacattcagagtccggcacattctgccaaaagctcccgtcacagcaacactggatcctaaatgtaactggtggttccacctggagccattcacagaggcccaagggtcccaacagagcagatcctagaggcccccgtgccactgccaatatccatgtgccacgaggcagctcagtgattggattggtggcctttatgttgcagattgagatggtctaaagcacaggtcagatgagaactgcaatgggctcaaagaccatgcaggagcccagggcatagggacaccacagtcttctatgggctcatttcccttctacaacgtacagtgatgctggggtctctacctcatgtcttccctgtgtctgcaccaacttctcagtgtcagggaaagaaaaagaacagaaaatcaggacactcttgcaatggcagcaggacgtagagaggctatggcagccaggtccctgagctaaacgttcagctagacccctccaggtccggccccaacacgcccactcctaactggagccgagacacagaagcccttctgagcatgacacagaaacacagacatctaattttcccatggagcgcaggtgagaaagttctcatccaaacggtggtgatgtgggagctctaccatcgccagtgtcctagcagacaagagagatgttagaggcagagggaaggcagcagtgagtcttcagcaggcacagaggaccccataaggtgcacagtacaggatgccaaagagctggaattgcgagccgggctttcaggaatctggctttttttttttttttttatagacggagtctcactgtgtcacccaggctggagtgcagtggcacaattttggctcactgcaacctctgcctccccggttcaagcaaatctccagcctcagcctcccaagtagctgggactacaggtgcacgccactgaatccggctaatttttgtatttttagtacagatggggtttcaccatgttggccagactggtcttgaactcctgacctcaggtgatccacccgccttggcctcccagagtgttggcatacaggcatgagccaccatgcccagccaggaatctggattctaatgcaggagcagaaactgatctttgaactactctcaatgttacctgcacaccaacaattatgaaataaatataaaaagtgacacagagaaacgtcagggccaggaaaaaagagatgggtgtgatgaggaggggcaagaggacttgcaggtgagggtgggttttgagctgtgattcataaacagtaaaaaatacaggggggtgggtggcagggagaagaggggcacctcaggaaagaagggagagagagaggaagagcaagaagctgctctgtggagcaacctggtgttcagcggaggctggggctacgcactccgaactggaatgctgatgggctgggggagagttccaagtcattaagtgagatggcacaggtggggtgcccaggcaagcttccaagcacagagcttggcaccaagcacgccctgagtagaatttagctctcttcctctcccttctccatgtcaagtgtaacagattgggctagtagattgcagagctgaggacctggctggagaagctcgctttcacagggaagatggaacatgtgtcacgcagcatccaaaggcaatggtggccaagcacgaccccgaagggagggggtacagaggagacacagctgggtccccagccgctgagacagggactcctaggcaggggttgaggacggaccaagcagcttctaggggtctgggaagccccctctgggcctgtgtgttcatatatgcatgccccagagggaggataccaggcttgttttgggttctcaaggggggcctgggatgttcagtgagctgaccggcagcactggagctccccaagtcccttgcccagaagttgccttcccagctgtctacacagccgactgtctacacagctcaattgcaaagcacccagacaagcgtattggattgctggcactgcatgtggccagctggccctgagctcacttgtcacaagcattagtttgcaagtaagaagtacgtgggggcattgtgctgggggacatgaaggctgggaaccaagcaggcctggtttagacagatttctcaaagccttcattaggagggggctcctgcaaagctttcagcttttctaagcctcattgtcttaggtgtcaaaggaagattattgatattctgatcccactgtcactgggattggaaatgatgctggtgaaagacacagcactggcatgcaacaggagcagatttgctattgttttccacaatatcaagaaaaacattgagctagggcatctcaagaaagctccctgggtctggagagtttatttccaggagccacttactctttcagtgtttgtgctgagccattgctgtggcagagatgtgggatggatgctctcccaagttcataaccatcccagggcagttttcctggagatggagacacgagagatggttgcgagaggtccactgttttgtgaagtgagtttttaagccccaccttgccaccctgggtgatgataacggtagcacgttttgcagccaggagaagggctgtaatggcagctgaggccaccaacagatgcagagtactcagtgactccacctgcccacccagctggacctcctccccaagcctccctgcagcgggggctcggtcctgacctttgtcctgtttgatgctgccaggattactgaagaagtaatgtcctgctcagctctcttctgccttggccagagatggctgcgtgccgagagctggcgagagaggcatgttctgcccgtggccggtggtgtgtggagcaatgcaccaatgcgagcccgcagtgagggttcattaccatgcagatccaagttggcgaatggagaccaattgtttgggcagattgcttactgtctagctagagaggcatgatgagaactcaggatcttgcatttccaggctattttgcaaatcttcaggtgcccatttctaggaggaacagcatcactcaagtgcttctgtggtgttgggtgcagcaggtgggagatgggaagcccgcttcctcttgttgagccctttacaggggtcattactgttcctgggagcttgccagagccacacagctcaccttagctctgcatccttcagtgggtcaggcctggggactgccaccctctcagggcctccctgcaataggaaagggctgagggatgagaagggagtcacttgccagcctgcaagcatctgggaaggaactggctttgggggcttgggtcactgtcacagccaggaggagcagcagcactttccctctgcttccagagcaatctgccatggcccagtggcagcctcaaagctggctgacatctggcaaatgagcgtgggatgcagcttgagcttccagagtgtacacgctcccttctgggcagaccccaggggctcaggaagcctccgaagcaaactctgttttcaagggctagtgaggagtcacagttggcacacagccctcccattggcagtgccccttcttcgatggagggcatgtagcttatcctcacatcctggcagtagcccctctggtgggcagacaagcaggtgacgtgggcaaagcatttatgaagatgaatctgcaggtggcccccagctctgctcctcagaaagcctcccggccccatttggagttcagaggacctggctcctgggtggagggaagggagacccttggagtggggagcctggataggggagagcaggcagccttcctgctgcagcacggccacaagccaacacctggccgagcaacctgcacccgtgggaggcagacgctcattcatcacccttgaagctcagcccttgcttcctcagcctctgggcaggcagagaagcaggaagagggctgaagagccatgaaatattgcccacagtccaaggtggggtcaccatcccaaggactatcctctgcctgggattttctttaggcttgtgtgcaaagacaggagtgtatcaaagcaggagggtgtctaggaactgcagaagtttagcgcactcagcgttgggcatacccagccttgatgactctctagaaaatgtccaagcccttcaaaaatgttgaggcctgagccaattttcccccaaccctgggcaacaccacccctgtgcccattcctgctatgtgctgggccctgcatcagggagaagcagacggaggaaactgagccaaaggacaaatggtggcagggagctgccccctttgcatccccagccccctgggtgggctcatccctggagattccacaggtgggtgagggcagcctgtggggtgcggccttccctggagatgaggagtttatagctccctgggctcaaatgtggtgggaaatttgaggacttgggtcatctcattgaaagaaagagctatggcatcagagggactaatttgaggagcccggcagcactgtggggaaatctacttatccctaaatgtcaactacccagttagttacattttcccaaccaaacggccccattgacctcaatcctccatgtgggagacccgatagagacttgtccttggaatggagggaaaaggaggccaagggagaatgtctttaaaaggtcactcaaagccacctcttcttaggacattaccacctcctcaccctgaaaaaataatcaatcaataaaaaacaaaaagcacaaccaaaatgtaagtacagctgcagtggctcctccctctctccctttccctacctccccctccgttgcctccctgctttgagctccaacctcttggatatttatcgttcgctccctcctaaatcattcctgacggctggactgctcacactccattacagggcgaggctgtgcggagtcgcagttccgtttagcttgcagaaaaaggagcctcctaggaaaaacccacccgggagctgtccggtgctgaactccggcatgatggacgattatggaccaactgcactttcagagggggatagatttatgagcggaagagacagctagaagagtgtccattactataactcactgccctcttcagagatattctaatcaggcatcctttcctaccaccgaaaggcgcaggttaagaactagcaagaggggaaatcaattacatacttctggggcggtttcttccagagcatcactgtctgtggcattgggggtaagggcatcaggaggccggggatgggggtggatggtggtgggcccctccacctgccaaagcaggcttcccatcagcacttcctagcgtctcccgtcacaccactgctcttgatctcttgcaactggttgagaagctaggaggcgccaggatgtccctcccttctcgccctgcacggatctagttgagatttactgacaacccaggatcacgcagagggctgcagtgaaaatatctggttcttcctggtcgcccatgcactttgacactgatgtgcacaggggaagggaagagagtgaatctccatgggatgctggcctggggtcaggcactacactggatgccgtctatatattctttcaccataatcttattcttactttataggtgagagaacaaaggcccaaggaggtgccaggtttccagcccaggcctgcccaaccctctctagacaacccgcaggcacagttggcagtgcagaggtgcccctgggcactccctgccagaggtggcgagctccctgctccccagctcctctccagctgcattactcccgacatgtctcctctgggcccagacctcccaccctctaatgtggcctcagtgtgaaccctcaggccctgtctacttgaaccccagccctctagaaaagacagctacaaacagatttctcccatttctacaggacttcagagttcacaaagcattttgacactactgaacctgaccacagcccactgaggtgggcccaaacagataattttaaccccattttaaagatgaggacactaaggcccagagaggttaagtggcttccttgaagctgcacagcacaccaggagccgatctggaaccaagcccatgcctcctggctctgcagtcaggcctgtctgacctcactctctgcttcccagcaggctgctctgagcacagtcacccttgagcatttccttccctagggaccagcctgggctgggtaccccccacaccttccccacaaggctctccctctgtggttccagatcttctttcctttatccattcccttccctcgaatcactaccaggtcagagaagactggattttaagtcatgcaaagtgatgatcacacccttgagggtctccttggttcacacctccctgggaagggtaagtcctccaactcatggggagtccttggcaacctcaccctggcacaagctctgagactccagtcaaaggccctggacatcaggaaattcaccccacctcctgccaggaccctggtgttctccaagatgatgggtcggtggcctgagcgatggtgtccagctcagcagcagcgaccacggatgaatgctccagagccaggtcctaaccgggatgaaatcaggctgcacctgagagcagcagaagctcaaggtgtctttcttttgttgcttttatttttatttatgttttaaaaaactacagtcctacctgcctcacctgggagctcacctgtggctttttcacctgggaaaatacttctggttttgccaagcctgctatagtcatccacttattccttctcttttttttgagacggagtctccctctgtcacccaggctggagtgcagtggcacagtcttggctcactgcaacctccgcctcctgggttcaagcgattctcctgcctcagcctccagagtagttgggactacaggcatgtgtcaccacacctggctaatttttgtacttttagtagagacagggtttcaccatgttggccaggctggtctcaatctcctgacctcacaatccacctacctcggcctcccaaagtgctgggattacaggtgtgagccaccgcacctggccttccttctctctcttatctatacaaacattgatgacaaaacctgaccttgctctgggcaatcaggaaaggttttctgcaggaggtcacacctgctgagcagtggaaaaggtggtcaggtagaaggagagtgggagggcagagcccgtgggtgcaaacacgggcaggactcatggcatactattctgtgtgtctggaacggagatgggatagatccaggaggcgtgaggctggattggggagcaggggcaaggaccccttttgatagaaccttgccctaagcctcttactctgcagaactggccactttctgctgagcattcaggacagggtcatccactgtgcagaccacaccgtccattgtggcagggctatctggtagctggggtgaccctggccacaatctgtggctgagatgcctggccccatagccactggcatatgtggattttgaacacttgaaggtttttgggagtcagcatgcctgaggaacagaattcatcactgtatttcattttaatttgattcaatggaaatggccacccatgacccgtggccaccgttgcaaacagcacaggtctgggtggtgagatgctgctgacagcccccaggtcttgcacagcctgaccctcgcaggcactggctgagtgcacttcttgacaagaccctcatgttcccaggctttgagacccaagcaaactgctggcaacagagcgatggaagggggagtatctctctccacccggagacatttggcttcacctgtgaaaacagcatccacttgatgaatggccgtttcctgcactttgtaaaattaaattcttggcttggaccaagcagcgcagggttagccgtggttgcccagggatagggatggggcatcaggagggagcctgggcagcaaaggactcagggtccgaggtcctggcagctgccacacatggggtgggggagatcatgcaggcagagagctgaatcagcaggtgccccaggtatgggctgaaggcagaggggaagaagtaaagaataaaaatgcaagaaaggacccacgtggccaggagggacagggaggaggctggatacagaaagatagtccccaccccacccactaaatcccagccctggctcccgcagggccaggcctctccagggaaccattcacatctgctctgagcttcccatggtgctcctcccatttcagacactggagaatggagggatccctaacatttccaacccaactctgctctgtatggaaacaaactcccttcccacgccattattaccatcatcatcttcactagtgcttggtccagtgtacccgtcatggtcatcctggggctcctatcaagggctcttcacccaaacctgtcccccatcctggccacactcctgccggtgatcctgtgcaccctggggaggaaggcatggaagtggctcccccagcctcttctcccaccgtagcagttcctgctgatggtgttacgtggccacgccatcaacccagatcacccgtgagaacttccttcattaaagggccactatataacctgaaattattccacaccgtgccctctcctccttccctggaaggagctctgcatgcctggtgggggctctgagcaataccctctggtccatgtctctcacctgcaaagtctagggaagctgtaggccccccaccccggcctaatggccagccccggtgcatcttcaggaagacacagaggcaccctggcccacgcctgtcctggattcacccctcgctctcccaggagatctccatctatggctcccatcccggttcctcttcaccgggcttctcttttaaacaaatggctggtcgcacattttagcctggtgtcaccaagggtcccacgcagagtccggctccttctcagacccttcagccctgacctctcgtgctgatctgtccagagtggaagaaatcactcatcccaggagcacctctgttcacacccctaagtcacagccagaaaacagcccccaacacccacccaggcctgcatctctcagctctccattcagagctgaagagttaagctgggcagaaaaactgaccatcacatgaactccagagactcttgtgtgtgagcatgtgtgtgtgcaggtgcgtgtgggcgcgcgtgtacctgcgtgtcttcactgcttctccagatgagtttaaccccgctgtgggacacagcaatgtcttctctttcccctgtgccccctgacccccggtagagtagacactggggagtgtcaccctcattgaggtgaaattgaagggtttggggtatcatgctggtttcactgccatgcaggggcttcccctcttgccctggatggttctggaattgccctaggactacacaggagtccccccagttttctcccactcagaccctcactgtcatggtcaaaatcccctccaccgagcacaacgatgccacctgttgtggttttttttcttttcacgctgcagaatcttgggtcattcctgcagatgcttgaaatagacgaggggatattcaggttccacacgcttctccgttttacagaggcggggttttcagggtggcagggggtctgatagtggtcccactcctgtctcccccaggcctctcccacacccctgactctcaccagtttctggctctgggacgggcaaaatccagccccacggccaccatgtgggcttggggatcatgaagtcacgtggtggggctgtgcctggggggtcttctctgggtctgaaggtccttgggccgctccctgatcaaccaggtcctactcactctgagccaaggatggaccctcccttcggagaagccttccctgactctgtggccaacaggaccttctctcccagcttctggtctcagggctctgacagcctggggcagccgtcggccacgtctcgctgtgttctgacacacactgggtctcggatccttgtgtcatttcactctatgttgctcctgtttcatgaatgtgggtcccatcccgctaactgaccggtatgcttagattttaaagaaacgtatatctgcagcccccaggctctaagcatctctttccaagtatttatgggttctgtcccctcccagaccgcccagctcaacatgggcaaaaagcaaaagctgtgttcctggcaccctatttatttctgttccttgacaacccctccctgagcctcatggacttcaagccctgctgtcccttcggccaccatctcccatgctcagcccagaagcatttcccctgccgtttgcctttcctcttcattctcactcttttccttacaagtggtccctggtcgccacatgtctgggatggccacactgcctctcccctgtcccgttctgttcacattaccagagtcaacaagccccttcctgcctccaaagcctctggggggtgcatcactgtcagggtgggtgtcaagacccaccccaagctgaacctggggacccaacacaaatgtttcgcttcattccagaggcctctgccccccctggacccctggagaatgtcctgcccgtggctccagcctgcactgctcagtgttgttattagacgttttcacaaatgcagattctagatctcctaagagattgaagacggcactcccagaagacggcaccccatcacaatcacttttgttctctgctgcacctgccccggggctgggcaagtaattgacaccgcaaggactttctgaactaaaagcgtgctgtggcctgcccgctgttaacacccccatcttcccactggaagtgaggccacacagctctggtctttagtgacactacaggggacagcacagaatcccagttttcttcgactatttttctcaatgcccctggaagcacggagggtcccgaccacccagtgtgaagccctcctgtgcggctcacagggccagcctggtcctcttggtagagacgtgcaccccacgatgacagtcacttcctgctgctctagactattctgtttttccattctatctcaggtctgagcaaccacgtgtccagactccttggggctccaggagcagacccagggctcccggcaggtctgctctggtcccacctacagggtcatccgaaaaccagagcagccatgaactagcccctcttagcggctgcctgccttctttccccacaccccttgccatttcctgctccttgtctgctgccgtctgggctggaattctgtctccaaattggagatcactccaggccctcaggactggaatttgagccctgggaggggaagggaccatttgtagctcttttctttttttatgctgctgagcgaagcagggatcaggctgagcacagctgccagggaggtggtgttttgtgataaatcaataaactgctcggggtgggagagggaaagggatagatagggagccctaggatgctggagaggaggcaggctctggggtccacgtgagcacctgagtcaatgaacaaaaagagatgagagacggggtgcagaggggaggggagcacatgagtgaggggcagccagagacagagacacagagaagtgtgggggcgtggggagacagaaacatagaaccagagagacagagagaacagagacacacacagagagacaaagagagacagagatggagacagagagacaaagagagatggagacagagagacaaagagagacggagacagagagagagagacagaaagacagagcctgagagacaaagagagcagagacacagagagagacagagagataaagagaggcagagacagagagggagacagagccagagagaaaaagagagacagagacatagagaaagagagagagatggggtgggggagagagagagacagaaaaacagagatggggagacaaagagaacagggacagagagagacagaggcagaaagacagatagacagacacagagaaacgggagggaaagagacagacagaaagaggtagagagacagagagagagaaacagaggaagagagagagagatggggtgggggagagacatatagatagacagagacatagagaaaggggagggagagagacaaagagacagacacagagaaaaagagagagagagaaacaggcagagacagaggaggacaggccaggggagaccctgccagcctttaccagggaggagactgaccctccaaaaccacatttacacgcagcagaccagctcacagcctcagtgaggcctgcacccatcaaaggatttgggggaaggtgtcctcgcttcctgaactattttcattaaaagaaaaaagttgccgagctggcttctccacactggcctcctgcgtactgtgctctgcaatggtcttgctttcttttgttccagagacacagaactgtttaattctcatcccttcaatcaatacctggtgtcatgtcatccaaagccattatttttacaccagagaaaaatggagaccgagtacagtataaagagagagaggagacagaaatcattgcttcagaggctgcaagtgaaaacctcgctcagagccacccaacctcagcatcatccagctggctctgcaggtctcctggctcccagaacaaaagcacctggagaagcaggtgcaggagaggaaagtcctgggggaagaatgtcccatgaccccagagaggtctgtctgatggcaaacagcttcttcccaaagacacacccacagtcagcccctggatgggagttcagcaagggctgagtctcccccagctccctgatcccatcctcctctccctccatacctcccactctgcctctgcccccattcctgcccttcaccccacgagcacacacagcttccacatcctcaagaggcatcatcctgggaccttccccctctcccagatgccgaggtgtctcctctgtctcctccagactctgtctacactgccacatcgtcccttcctaggaattggaatctgcccatgtccccacccctcccttgggaattcccaccctggtcaccaacgatcccctcattgccaaatccagcaatccatctcagtcctgccccatttcttgtttctgttgcttttacctgatgatccttgaaactgcctttttccatcacctcttcctgtttctaccatccacccattcctagggccccagttccttccccacacctcctaaatcacaatctttagcttgggcctccctctctcgagactcctgtgtcctagtagacactttcacccagagatgtgccccaggtggcttcactggcacccaatgcttctcctgcatctgccatctcagacagtggcatcgccagctgcatggcatccagacaacaaagtggaatcatggtcacccactcctcatgctccgtaggttacagggacttgttggtgtctcggaacctgtccctttctgggtatccactgcttctgacgctgggcctggattcttggaattgcatccttagtgttcagatcctggaaccactgtttcaaaatctcctccttacctagagatgggcttcttaacccttcggggcccctaggaaacctcttcccagaaaaggcacatatgtgcacaaaagtttgcaaccatttcaggaggctcatgggccaactggagcccatctgtgaggcctacagtttaggagcctaggtctgcaggcccaagactgagctctccagggaaccaggaccatcacactccagctcccacacatctttccagcctcagtttcctcgtctgccacatgacagcagtaatggacccatctcagaggatgcttgtgagcttgaagatgcagtgaaaaccacatcgagctgtgcctgttgcctgtgcctggcacgtagcaagtgtctcaccccccaaccagcccagcccaccctgcacagacacagtggcatttctccagcatgctgggggccttcccttgacaaaccttggacattctgtctagaatattctctgccagggaaccctctcttaccctctgaaacctggctcagatgccacctcctctctgctgcctggagcctcactagggctcccagagttactgtcatcacactgtgtctgcctctgcatccaggtgcttcattagaggggcgtatgtgggcctctccctgtgtagacgaggctgccagaggatggggctggctggctccagcttctcctgcccccagatgcacagactccagcacacagcaggtggccaacatgagtatgcttgatttgcaaatgaaacagatggagatgtccatttgcgaccaaaaggagatgcctaggacagagtctgggggacctgcatgtgccttctttcacccttgtgagggctgagaaatgaaacatcatgtaagtgtatgtatatgtgtgtgtatatatgtatgtatatgttttcacatgcacgttttgctattatttactttaacacgcacagacactattgtcatcaccctcgtcttacagtggaggaggctgaggtccgacacttggccatgcacggatcctctagaatcaggactccagccagcctctcatctctaggtcccaggctacactggagtgtccgtgtacacaggcatgagtccacaccccttggcgcagaacccccagcctccgccatctggctcttgctttctgccctggttttcctccagtgacatctacaaccacgctgggtctggccctgctcccacgtgctcatgctcacaggtgctgtgctccacctgagcccctccaggccccacttgctcccgtcctctcgtcctccacatctcagatccccaaagccttccctggcaccgcacactcaggcaatctcacctgcccctgcactccacgtagcctgcagccatcttagcttttcctgttcaatattggaactttccagaaatgctaccctagttgtcatccttatcctattcaatgggtttctacagaaaagaaaactcgctgtttctcacacctgccggtctgcctgcgccgcttcgtagacaccgccctccctctgtgctgtttgccatggactccagatagcttcacacacattccttcatttcaccccatcacacccgttcttttaaatcccactgttctggccgggagcagtggctctcgcctgtaatcccagcactttgagaggccaaggtgagtggatcacctgaggtcaggagttcgagaccagcctggccaacatgacgaaaacccatctctactaaaaatacaaaacttagccgggcatggtggtatacgtctgtactcccagctactcaggaggctgaggcaggagaatcacttgaactcaggaggcagaggttgcagtgagccaagatcgcaccactgcattccagcctgggcgacagagtgagatttcatctcaaaaaataaataaataaataaataaataaataaaataaattgaaaaaaaaaataaatcccactgttccaggtggggcaaccgagcttctgaaaagctgaagtcccctgtccagcagcgcatggagacagaactgtgcaaagggttgggtcacattcagctgtctggactcacaagggcagaaatcagtgagacccacaggtgaggtccctggcctcgtcctctctcctccacactggaccttcagtaaagacggtgctgtcctcaggcccgatcccagccctggctcaaccaagggcagctcattcagggggatcacaacaggggggtggctctgaaccaggaggtgcacatagtgaataccaacagagaatcttccagagctttggggcttttactggtggctgatggccttcaggaggcaattaaaaaggcacaataaaaagtgaagtgggccgggtgaggtggctcacgcctgtaatcccagcacttcgggaggcagaggcgggtggatcacctgaggccaggagtttgagacaaccctggcgaacatggtgaaaccctgtctctactaataatacaaaaattagctgggcatggtagtgcacgcctgtaatcccagctacttgggaagctgaggcagaagaatcgcttgaacctggagcagaggttgcagtgagaggagattttaccactgcactccagcctgggcaacagagagagactccatctcaaaaaataaaaaaggtgagtgctcttatttcgatagtcctgactctcacaccacgggaaaggaccacgtcatcttggctcctcctaggatcagactccaggctaggacttttcaaaggaaacattgtgcttacctgacaaaaaaaaaattaatcccaggtgggatggagccacacatcctaacaaacttctccttggcatctctggcaccactgctatttccagaaccatctctcaaagcccacgcacagcacagctgcatccgggcacaaatgcactctcgtgtgtttgcactgacatgcatgcctcaggtccccgtgggcacatgcgtgtacaagaagagcccattcacaaatcggatcaagaaaatgcagttgcgccgggcacggtggctcacgcctgtaatcccaacactttgggaggccgaggcgagcagatcacttgaagttaggagttcgagaccagcctgcccaagatggtgaaacctaatctctactaaaaatacaaaaattagccaggtctcgtggcacacacctgtagtcccagctccttgggaggctgaggcagaaagaccagctgaacccgtgaggcagaggttgcagtgaggtgagactgtgccactggactacagcctgggcaacagagcaagacccagtctcaaaaaagaaaaagaaaagaaaatacagttgagtttactatatatatgtcacatacacacacacagagttcttatagcctacctctgaaagagaagtggcaggcatgtgtctctttttcttaaatttttgcttctgtttcatgtgtttgctggcatacttctccagattttttttttttttttagacagagtctcacagtgtcacccaggttggagcgcagtggcgcgatctcggctcactgcaacctctgcctcctgggctcaagtgagtctcctgtctcagcctcccgagtagctaggattacaggcacctgccaccatgcccggataatttttgtaattttaatagagacggggtttcaccatgttggtcaggctggtctcaaactccagacctcaggtgatccacccaccttagcctcccaaagtgctggggttacaggcatgagccaccgcgcctggccttctccagatattttttaacgggctggaaggaactggggtttctttttgatccttccaattgtcacctgcaatggtgggaacacagactggggctgtggtttgtgtagctctccgtggtgctgccctgagccgagaatatcagcagacagggagagtattgcaacccttctatgactgtagtttgtgaaatttctgtctttccatggaatttcagggtgatgctggtgagatgggaagagtccctgtgaaacagcttttccagaattgggtttggatcccccataattcaactccctgaggcaccgcaccgctgctattagcctgagaacttatttattaaagacttcctgtcatctgcattggttttcagcaaactatactcacttaaggggtcgacatacatcccccaggagtagaatctgtgagtttaccattccctgtcctttttggaactcgcattgctacacatgtccccaagtgcttcaacaaccacagagggaggagaggcgtgagatgcagtcagctgtgtgttccagaggatgcctttctgatgactgttgcttttccttgttagccctggagacaaataaagagctagctcaaacttgcttggccctgtttctactcttccttcccataatccttaggctattgtttgtgtttggctgtgtgatcagaacatttgcatcaaacccactagtgagagggaaggaggcggttctataaaaattcagatttagggctgctgaattctgaattctgaattctggggaatagaaaatctatttaccaagttgtgcaggtgattgctttcttttcttttcttttttttttttagacagtctcactctgttgcccaggctagagtacagtgatgcaatcatacctcactgccacctcgatcttccaggctcaagcaatcctcccgcctcagcctcctgagtggctgggactacaggcatgcaccaccacactcggataatttttaaatttgtttgtagagacagggttttgctgtgttgcccaggctgatcttgaagtcctgagctcgagtgatcctcttgtctcggcctcccaaagcgctggggttacaggcatgagccactgtgtccagcattgattcttagtcgcgctgaagcttggaaaaccattgttctcaaagtgagaattacccatcgcctacctcaagaaaaggcacagtgcaacaccagcctcacccacgagctcagtagaaagacagattctcactggagctgggtgggttccttattggagctggtgggagggaaggaggaagtggttccttaaaacacagactgctgggccccattcccagagtttctgattcagtatgtgtggaatggggtctgctaatttgcttttaaacaagtttcaagaaggttctgagcctgccggtctggaggccctgctgagagaagagctgtgctgggagacgataactcgggctggcacagcaactgttggcctggaagttggggtctgggtcctcattttggtcctaaccttagacaagtcactcaagtcccttctcctatttgattcagaattttttttggcataaaacaggactggattgaacaggtgtgcagttcctttctagcacctacattctacgactccagcccttgctgaaatgcagcagtaactggtgaccaggacaaacagctagcagagaagcagagtcctgctgatgccccctgttctccctctgtctttcagagtcctgtaccctactgatgttaaacttctgagcatgggccgggcacggcggctcacacctgtaatcccagcactttgggaggccaaggcgggcagatcacctgaggccaggagttcgagaccagcctgacgaacatggtgaaaccctgtccctactaaaaatacaaaaattagccaggtgtggtggtgcacgcctgtaatcccagctacttgggaggctgaggcaggaggattgcttgaacccgggaggtggaggttgcagtgagccgagatcacaccattgcactccagcctgggcaatagagtgagactccatctcaaaaaaaaaaacaaaaaacaaaaacaaaactctctgagcatgatagaatctatgttgggagccaggctgccagcagctgccttccgcaagccccacctcccagaagtgaaagcttctattcgttcttccccatggggcagggttcctgggcttacagcctgagccgccctgtgattttcagagttctgtgtaaagatggagtgtgttcccctccacacctccccagctgcatggggcagagtgacttcactgcacatcctggtgtgtctgaaaagcgacatgatttgggggtgattaaaggcaacccacatgcttgatgagcatgtaattattgcctgtttcatgacacgggtctggcactcagaaacctggagacgcaagcacttgcagtttttcatgacagcctgacttcatccgatgaatgaaaaaaaaaagtaaggaaaagaaaaaagatgaaaacatctgtaatgaacatctggattccattgctaaccatgaaagcaaattcctcagagtcagcatgccggagagggctgggaaagggtgtatttataaacaactgtggtacttgaatcagaaaaaatgcccccaaacaccaccccttcctgtttgaaaacctttcagaatggagaagcattgagtttcagttctgtgtctaagcaatggagaaacagttacacctgcaagtcaagctctggactcaaacaaacataatgacagcctctgggctcagcagttggttccccaaaacagtcatctgaagaaaagattcaaatacctctgagtgtttgcgggtgtgtgtgcagtcatgtgagtgcacagacatgcacacgggaaggcagacatgcacgtatgcacagtgtgtacacagtcatgcacacctgtaggcgtgggtgtgtgcagagagtcatgcacacaggaatgcaggcaggggtacacaggtgtgtgtgtacatgtgtgtgcacaggtgtgcacacagaaatgtaggcatgtgttcatgtctcatgtgtgtatgcatgcacagaaatgtccaattcatatgccacagcccacttttttgcagcctccttttttacttcctcatactatacagcttcataccttgtttacaacttcccattattcatatacctatcaccaagttgtgccctcttcgtgcgtaactaattgagttcgtgggaggctgttgctgggggtccggcaattacagcacagtggcgggtgttggaagccaggggagctgaggctaggcagcatggctggggctggggcacggctgtcctacacgccacatgggctgtgcacatggaggctccttgttggcaccttggaaagccttagggtccatttctctacctggagaagcagtcactgccccttggtgtgtgcatgggggacagagccagggagcgtctcccttgctccctttctgagttctgagctccaggctccctgcataaccatcttaacagaaagaggagtggcgagcctgtctgctctcataaaccatgtgcccctgcaaacccccaagccagggctaagggaaaaacaatttgcagccggtggctcctaatagatggaaataactctatccgtgaatgcaggtgatgcgctaatgtgaaaagagatgaaaagtggaattcatttggaaaattttggctttggcccccaaggctggggcaagagggtgtcctccatggctggccccctccccggccccctcccagcctccctgtgagctgggggcagcctggcccaacctgtcacctggcattagaggcgataaaagccatgtgcttccctcacctcgtggtgcagctcgtgtttagggcctttgctttatcagtttttatttcgtgtaatattcatcacactggtttatttatggggcccttgttgggaagttatttttcaggcctggtgaataaaacattagactttgcggcttgtcagggtgactgcggctactctgatgtcagcctgacaaaccgccttttctttttcccaacaactgcacttttagagaaatttatttgtattttgttgggcatttgttgtttttttctccttttggctggtggatgttggtcagagtcgaagtctctctctctcgtctgattaaatgctggagccttcacttgctgagaaaggcaatatgttaagcaggagaagtgaggtgagcacctcgggcctccagaacctaagtcctgggctacaggagagccatgggatcccaaagcctgcaatgaatcccctccctgcaaagcctagcggctcaacctgggtgttcacagccagtgagcgaagtgctttagccgtgcaggtcagagtcgaaggatgacctggaggaactgctggagaggttgatggggctttgtgcggaaaggcagagggcacaggagtgtgggtcctaaaatcctaatgagaataatgggggaaaatcccaataaattaaaaacaaaacaggcgaaatgtggctttaagcaaagctctcaataagaaaatctgcacttaaggaaaactagggtgaagagactcactttacaacggggcttgtcacagtatttctcagttattctcatgcacttaaaatgtggattactttacatgacttttcaagttttgttaaacaagagaaagagaacacagtggggggagagagaaagagaaagagaaagagcgagagagagagagagagagagagaaacctggtaatgctatatttcagattgaagagtgttgagtttttctttctttctccccagaaatcaaaaggattaagaaaaccccaatcaataacaatccagccagctgctggtgattcactgtgacttgtcctttagatggcttagtacatgacgatctcttcattaagtgatacctggactgtgttcatccttactaatagctcataagctcagtggcttttttaaaactggaggaagggccaggcgaggtaactcacacctgtaatcccagcactttgggaggcctaggagggtggatcacctgaggtcaggagtttgagaccaacgtgatgaaaccccatctctgctaaaaatacaaaaattagccaggtgtggtggtgcacacctgtagtcccagctactcgggaagctgaggcatgagaattgcttgaatttgggagatcgaggttgcagtgagccgagattgcaccactgcactccagcctgggagacagagtgagactcggtctcaaaagaaaaaacaaacaaacaaacaaaaaaacccaaaaacactggaggaagaaaatgtcatttagcttcttgagcaacaccaccaccagaccaagggcatcagcttcccttcttggattctcccgtggatcaggtgtcacctgggatggctgcacactgacccctagtaacagaggctaccatttgtggggtatgtactgtcagccaggcagtgaagaaaagggtgccatcattcatcttccttcatcattcatgagacaggtcctgtcagcccatcttacaggtgaggaagctgaactcagaggtggaagaacagcccaaagtcactcagaggaatcacggggcaggaattggacacagcctgcccgtatctaagctcttacatgaatctccctgcccacaggtcggctgcatgcacaggaccatggaattagacccccatactctccagagagatcccactcaagtgggtatgagagatgccaggaagatgccactgatccattagtgtctgtgacaaggacaaacacttatataaaccacatcaaatctccaagaggggttagtgtgggctacatgcacccctgtcagaggtgtaggcaaatgggatggatgatttgagaatcaggatgctcatacacagctagggttctatgtcccgggtcctgaggccaacatcttttcctccagactttaaggagtcaagacctaaagtaaaaaatgcaaatatatcttccaaaaaaattccttgatttgggggaaattttaactggctaatttgagttggcataaatgaaaaaattccagactgccagtgagtacatccttggaaggctctaccattcccgagagctttcaaacaacctccggcgattctacaagcaccaataaaaacaaggactatgcatctctcccaacagccaccccctaccagagctgctgccctctccctctatccccttcctcattgggcttctcaatcattttcctgcagaggatggattcatgttgtcactttgtttgattatttatttatttatttatttatttatttagaagacggagtctcactccattgcccaggctggagtgcggtggcacaatcttggctcactgcaacttccacctcccaagttcaagcgattcttgtgcctcagccccccaagtacctgggattacaggtgcatgccaccatgcctggctaatttttggatttttagtagaggtgaagttttcaccatgttggccaggctggtctcaaactcctgatctcaggtgatccacccacttcagcctcccaaagtgctgggattacaggcatgagccaccacgcccggccatctgtttgcttttcaacccaccccaatctgcctctgtccacaccacttcatcaaaactctcttatcaaggtcacatttgaccctctgactgcaaaactcagaggatgaagtcacttgcctgtcctcagaccatacttgaccactcctaccttccttctggaaacaagtttttctttggttttgtgacactaaactgctgactgttctctgcctgtagggctgattattctctgttgtttttgctgaactctaaatgctggagttcttcagaggacaattctaactgtcttcttcaacagcagtgttcctgagagcttctcttctccacctgtttgttttggtttgttttgtttgaagaattgatccattttacctaaattgtgacatttacgtgcatagagttgcctgtagtattcccttattatccttctaatggctgcagggtctgtagtgatgtcccctgcttcattactgagattggtaatttgtcttttgtttatccttgttggtcttgctagatagaagtttatcagttttattgctctgttcataaagggattgaaccaatttatgctgtccttcttatgaataagaagcctgatgatcattatattttctgaaacttggatttgtcaggctttgaaagtcttgccaatcaaatggaagttaaacgctactcattgtggtctagatttgcatttcccagctgattagtgaggttaaacatctctttttatgtttattgattatatattctcttctgtatgaaattcctgcctgtcctctgcttttttctcttttgggatgttttatacttttcttcttgattttcagttatttaaacatttttgatactaatcttttgtcagttgtgtgtattgccaatattttcttctagtcttttcacttcttaaagacttcactttttctaaaccattcaatatattgaattaaaaagcacttattttttcttaactttaatgtactcaagtctgtcaatctttttttatactcatttgatgtgtcttgtttaagacattttcctctatgagatttgttttttgtttgtttgtttgttttgtttttttgagatggagtctttcacccaggctggaatgcagtggtgtgatcttggctcactgcaatctgcacctcccgggttcaagcaattctcctgccttagcctcccaagtagctgggattacaagcacacaccaccatacctggctaattttttgcatttttagtagagatgagggttccatcatgttggccaggctggtctcgaactcctgacctcaggtgatccacccacctcagcctcccaaagtgctaggattacaggtgtgagccaccatgcctggcctcctctaagagatttttgacatttaactacttcatccacctatgtccattttcaaaatatggtgtgaggtagagatctaatagtgtactttgtatatgggtaactacacaatttttttttccagctcactttgttaaacatccctgccttttgccagtgatttgaaatgctacctctaacataaccaaagttacataagttcatggatctgtttctgggaatcctgggaattgattaattggttgatccttatgacaacactaggtaatcttaattaccatagcttcacaatgagcccagatatgcgataggagaagtatctccttcatgctctgctcctcagaggggttctggctaatttttggtgtcttaatcttctatatcgtcatttgatgaggctccaattgggaattaatcagaattgcattggctgtagtcaatatagatcaacatggggaaaatgacattttaatgatataaaaacttcctattcatttattagaactcctctacttacacttcataaagttgtacattttgcctgtataagtcttaagcattttaaaattaaattaaaattaaatttattcctaggtatttgacattttctgatactactaaaaacaatgtcttctatttgtgtgtgtttgctgctggtatgtagataaaaactgagttaaacttatgccagataacttgctatactctccagtttctaaaagattttgtgtagatttgggcaagggttctatgtaaatgatcatatcatctgaaaataatacaattttttgttctttccaatccttacacatctagcttctttttctctctttgttgcactgcataggagaatggaagttttactagctttcacatctgaatgacaatttggctgcatgtaaaagtctatgttctatgttcttttattctgtgctttgaatatatcactccattgtcttcctgcatctggcatagctgttgaaaatcctgaagtctgtataataacttgctctttgtgtgtgatctcttcctgtctggaaacattaagaactttatctttgttattcttaaatttcactgtaagtgtataggttttgtttccctcttatctcttctttttgggactccaagacctcttcaacctgggctctttcatcctttttctttaaatcccattgattttatctccacattttcttcatatatgtcctcttctatatttttatttttctctctttgtaggacttctatgatccacatgttaacaacttaacattagcaccttaacttctttcctccttgtgttagaacttttctattttctttttctttgtgcttttccttatttttttcttggctgatacatcaagctggtcctccaattcacaaatgcattcctcagttatttattctagtacttttctcctgtatcgcattatttccacagctataccttaacaccaacaatttctactcggttcctttgtatatcttcttgatcttatttcacattgctaatatgtcccttatctcatttaggaggtttattaagcttatttttaaaattggtccctctgttctggtatttctattctgatagaatctggaagctgtaactcagtttgttgccttaaaaaaaatgcttgtgcttctcgaataccttgttattttgcctgccagctcattccctccagtggaagtctgctactctgccctgccctgtctgagaggtgggtagcccagtaagcctgagtgatctcagagagcggtgggtgaatgtactccaagtggagaggctccaaaaaatcacagtcaaccccatccactccaccaaattcctccttagatcagagcttcaccttccccctcctgagagatgcggcattcagagggacctccccaagcctgaaatagtgcagtctcctggtcgtctgcagaaaagcggggaagtgactgctggggtcaggtgggctgcacctgttttgcttggctccctgtgagcacaggtccctctgctgctgtgctgtattaacacctgcacctgagccctgcatagccacaggtatagacaggcatggtttgtcccaaggcaatagtggctggagctgggctaagtaagaacagacatcaaacattccccttcacgcttattctcccatagctgtgtttggcccacccctgctccaggccaaagccatagccccatgcacaatgatttgaaacccctcaccccctccatctgctgtctcattggtttcactctattcttcccctaggggtgagtttggagcaaggagctagtggtcttgctggttaccatcagaacaaacccaatttcttttcttttccttttttttttttttttttttttttttgagacagagtttcactctttttaaacaggctggagtgcagtagtgccatctcggctcactgcaacctccgcctcctgggttcaagtgattctcctgcctcagcttctcaagtagctgggcttacaggtatgccccaccatgcccggctaattttgtatttttagtagggacggggtttcaccatgttggccaggttggtctccaactcctgacctcaggtgatccacctcggcctcccaaagtgctggtattacagacatgagccaccacccccggcctaaacccactttttcaatcataatgtgtccaagcagatctcccgacatctccactctccgagaaaccctgctcttccctctgcatccttcatgtgggtaaacaatccctccaggcaccttattagctacatcccctctgaaagccagctgtgcctctatctctccctcttcccacaaattcaactcactgccaagtccagtaagttctgtctccaaaatgtacccatttcttggctccttccccatccccacgcctggcgctccatcatctcctgccccaaccatgcaagtttcctgcttggagtccctgcttcaccctcaccgagcagccagacctatccctgctcagcccctgcacgtgccttccactgagctgtgggctgcggggccaggcacagtcctgcctgcaccctctcctcccacctctcaccactcgcactcctctgcccactcagccacacagccttgctgggtctggggtcactctcatttgctgagatcctgcctcccgggggccactgctattgctcctgcttctgtctgtcacctctcactctcctcctcacttctcccaccttctcctccttctcccaactcctactcaccctcccggtccctattgaaattctgcttctcagagaacccccagacctcccattgaagcaccccaggatgccttgagcatttccctgaccatggtgaccactctttcatgtttccactggtttgtgcgactccagtctgatgtctggtgatcccaccaggcccggcaatgcctgaagatgacgtccctgcttatttcctttccccctgtatccccggggctcagcccagccctggaataccgtcacagctcaacaaagatgcgtcatgtagcttggtgcaccgagagatgccatcagtggtggatccccagcagggccttgcctcctagggaagccgaggtaggcacagccgtgatcaccaggacggaatgggttccctgagccccccggggcaggcacggccatgatcaccaggacagaatgggttccctgagcctaggccacgtggcccacacccacagttgggtgccctctgctccaggaggagaggctccagaaaatcacagtccacatcgtccatgccaccaaagtcgtccttaggtcattcagatctgctcatccctcgcagatccattcccgccccacctgtgtagagagaatcagacactcaagccagccaatggtggctcaggcatggggaggagagcgcccaggatgccccctgtccgtggcattgtccaacagctctgtcctccctggctgcagctgccctggcagcccctcctgacaggcagttctgacagtggccggctctgcgccccatcccgcctctccagtcctaggggcttctgtctgctgctgtccttcctcctctgatggtcctgtttaattctccaactcttccctggtcagtgtaactgattcttggtattaaatgctctctctgaaactcccagatgggtctcccttctcctggggggaccctgactgatacatcctgtgactataggttcttagagtaaaaggcaatttcatttcatttcatagttatggattgatagggtgaccaatgaatcctggtttgtctaggattatcctgattttagcagtgaaagtctacatcccagaaactccttagtcctgggcaagtccagccatgctggccctggggacttcatggaaggcaggcatggctgtgacccctgccccaccatgcctctgtccctgagaaagcaagaatgaccacggctcacatgccagccggtgtgtccctgtgacctggtgctctgcagggaagatgcaccatcctgtgagagcccctgatgagggttgtggcagacagggctcaggcagggcggcctgcagggtggcgtgagctggcatgaattgcggggaaagaaggtctctctgagctcaggcgcccccatggcgactctcccaccttccagtgccctggctgtcacctcatttttttctttctctaactccccttcccaccttttcccctccctggcatcccctggtaacctctaatccactttctttctctctgaatctgccttctctagggaccttatgcacgatgaatggttcagtatttgcccctgtgcatctggctgtttcacccgacgtaatgttttcaaggttcctctgtgctgtagcatgtgccagaatttccttccttttaccaggctatgtaatattcatggatagaccacattttgtgtatctgttcatccatcgacagacacttgctttgcttctacgctttggctgctgtgaacgatgctgctatgaacaccagcacaagagtctctgagtcgctgtgttcaattctctgggggcatgttccttgaagtggaagtgctgggccacagggtagggctctgtatagctttttgagacactgtcaaactgtttttccaaagcagccacatgctttacattcctatctgcaaggagcaagggtcccagtttctaaccatccttgcccattcttgctttttttaagatggagtctcactgtgtcacccaggctggagtgcagtggctcactgcagcctccacctcccagcttcaatcttgctgtcttttctattgcagacatcttactgtgtgccaggtggagtcttgttgagggtctgatttgcatttccttggtgacgatgatgtggagcatcttctcatgtgcctgttggccatttgtatgtctgctttggagaaatgtgtagtaagtcctttgcctatttttaaaagtgagccatttgccttcttggtgttgagttgtagttcctgatgtatcctgggttttaaactctcatctgagatatgatgtgcaaatatcttctcccatctgttggttgcttttccactttctcgatagtgtcctctgatacctcaggttttaattttgaggaagtacaatttttcttttgttgcctgtgcttttggagtcctaccctcacccttgttttaaggcctccttgacatttgttttcctagagagtcgttcagggcctacaggtccctgtgggaaatcaggatgggaggggatcttagaggcctgtgaaccccggcttctactgagaggagaagcttctgcattcctggtggagcaagcatatccaccagaaccactagaaccagccccatcagcacccacctccttctgtgtcctgccttttcctcctttcaagggaagttgttatggtttggctctgtgtccccacccaaatctcatgttgaattgtgatcccaactgttggacatggggcctggtggaaggtgattggatcatgggggtggtttttaatgtttcagcaccaaccccctagtgctatctcatgagtgagttctcatgatatctggttgtttaaaagtgtgtagcactgccctctttgatctctctcctgccaccatgtgaagatgtgcctgcttcctctttgtcttctgccatgattgtaagtttctgaggcctccccagccatgcttcctgtgcagcctgcagaactgtgagccaattaaatctcttttctttataaactactcagcctcggttctttatggcagtgcgagaacagatgaaaacagaagtgccctgagggaatgcatggtctccaagtgccttccattcactggccaggcaccgctgtctcagatcacatccccaacttacctcttaaatgttccctctggaaaggtaaaaactccatgatgtcagagtccactctggtttactggtgtggcccacacctcctagggttcccttacatccacagtgagtgaagaaaggcaaagaatggtgcacaatgaggcatgggtggcaaagagcctgctgccccccagaaatgacctcacagtgtcaggtcacctaggggaccacctggtggggctcagcctcacaggctctgcagccccaccctgtctgcactgggaatgggtcctcctgctgggcactggggccacatcagttctactcattgacattgactggcacactccagcgagcactgccagagcctcccttttgggcagacagatgggaaagtttgctcatcaacacaaaggcgcttggagcatccacctggaacaggagtgaggatcacacagggactgcctcgggacatcaggatgacatggtctgacctgatgtatctgctgcacaggagggacatcgtcccttgacaataaaactatgagcctgcgttggcctggacgatcatgccctgaacaacctcgccctgaacagcacatcagggagctgctcaccagggcctctgcggctgctgtggacactggtgcgcaagtgtgtgtttgagtccctgctgaagtctccttcatcccagggtggctgggagcactgccctcccatcctctcctccatggggtgggatcttcccttcccctgagatctgtcaatgactctggccagctccgtggactctcctgtgagtgggagcacacttgcatgctcctcctcctccctgccactcactaggtgcccaacctgggtgatgagcaagctttgtttgtttgagcaaaaagagactcatctaacaatcttagcttacagaatttctgggaaatccaatatagcagctaagatgccactatataagaagcaatactgcccggagaaatacccatcactcatgcagatgctgcagtgaagctgcagaccaaacaccaaacctccaggaaatcactgcaaggaaaagccacgtgattctgcacgtggcctctccagaaagctgcgtgtcttctggggcctggagctcacatgacctcctcggtctcagccagtcgcgtttgtgcaccaccgaggcttagccaggtgtctggctgaaggtggagatcaagcagagtgctcctgaggcacgaggggcccccactggctttctcacccttccccaggcgaaccttgcactgtcctgtcctgcagatgaggtgtgcagtgggggccgctccctgaggtcccacccccgcgttacccacttgaccatcgacctccaagtcctctgcatctctctcaggagatcttccctttcaccacccgactcttatttttgtttttaatagccttaatgtttttagagaagttttacactcatagtgggatggatgggaaggtacagagagttcccacagaccccctgccctccccatgacatgcacagtcccccactgtccacaaccgcctccagagggtccatcagttcaatgggtgaactatacggacaacgtcattgtcacccagagtccagggctcacaggaggattagctgtcagtgtggtgatcctgtgggtttgggcaaatgtgtaaagacgcaggcccaccattctagtgtcatgcatggcggtgtcaccgccctaaagagcctctgtaggcactggggccacatcagttctactcattgacaatgactggctcactccagctagcactgccggagcctccctctcaggcagactgatggggaaatttgctcatcaacacaaaggcactgggagcatctgcctggagcaggagagtgaggacaccccagcccccggcatctacagatactctcagtggttccatagttcagccctttcagtcttggcgttttcaacatttttctcagaactaaccccgggacagacttcacttccaccacggggagaaaccagcgtggaaggcagtaggaagatgacagggactgaggcgtggaacagactgcgcgttcagcgcaagccaggttcctgctgcctctggtgcagctgtggggggagaggagccctcaggagggtttcccttcccagatgtgtgagagactcaggcacagggacctcacctccaactccggcccctcagagaggggttaatttccatatttcacgattaatcattattataactatttttagttccacaagacaaggtagtttaacacgctgtgcatttttgcaaggtatccttgatccttctaaagtaaaattaaaagctataattagctcccttaatagagaattgcacttggttcggcgtcagctaacagcgggctcccttccctggctgtgggattattaatgggtgttattttgctaatagtccgcccctctaatggggactcttcccaccggcctctcctctttatagccccacacgggatcattctgactctcggattccactttctcacctacttccaagaggtttaaaacatgaccgtgtaatcaacttaacacatttaacatttaacacggggttcggcacttgtggggtcgggggtccctgttcagagctgactctccctaagaagaaagttcttccgaggaaaggcatcaaggctttggctctgaacaagcatgtgaagcctgcagaacgtatcgagggctctggggagacgtgttgtttgcagagcaggctgacttctgttttcagccactggggcacaactccattgactttgccaggcaagcatttcctctctgcgtgggatacccgcccccgtttccaatgcttgtacccaagccaagtggccccgggcgatggtggcagaggcagctcccctccagcctctccaggtcctgctgcctgggaagccacctgctcctgaacccctgagttcaacgcatgttagaaactaaaagctgaatataccccaagcctgtgaattaattgcttttttttttttccgaaacggagtcttgctctgttgcccaggctggagtacagtggtttgatctcagctcactgcaacctccacctcccaggttcaagcaattctcctgcctcagccttcctagtagctgggataacaggctcacaccatcatgctcagctaatgttttaatttttagtagagatgggatttcaccatgttggccaggctggtcttgaactcctgacctcaggtgatctacctgccttagcttcccaaagtgctagaattacagacgtgaaccaccgtgcctggccgaactgctttttagaaattatgtttcttgtaagtgcaaggaaaattccagctctgctaaatgtttgacatccttatgtaatatgtgacttaggtaatttccatagtctgacatctggctcactcctaactccaaatatcactgcgtctgtataaactctttcccctctcctgaattagagcatgaatgtggggatgtgctttggggcgttcaccccaactgaagtctaagctcaagtgttcttggctcttgacttttggcaagaacttgagctgacgtcggtcctgcctgctgcctgaatgttcctgcttgtgaaacttggagaggcatgttctcccaggagcaggacatacttgcagaccctcctgcagacggggtgggggagagaggaggcacttgatcccacctgggcaatgccaaggtacctctgccgtgaggcacgtactttttcacttttaaaacagggaagttttttttttttttttttttttttttttttttttttttgaggaggagtctcactctgtcacccaggctagagtgctgtggcacaatcttggcttactgcaagctccacctcccaggttcaagcgattctcctgcctcagcctcccaggtagctgggattacaggtgcctgacaccatgtccagctaatttttgtatttttattagaggcagggtttcaccatgttggccaggctggtcttgaactcctgacctcaggtgacccacccaccttggcctcccaaagtgctaggattacaggcatgagccactgtgcccagccagttttgatttttttttttatgccatcagagaaggacataatttagtgataggtgtgaataactatttgggaaataatttctttcctaaaatatgtccagagagagaccaaaggtaagaatttgttgggaagaatcatgaaaagtcagttttcaccttgcagttacaaaggtgtcaaaagtgcagccgggcctgcctgggccagccactgcccctgctgcaactccgtccccctcagccagctcctgtcgggctgagcctcccagtggcactgagatgggacacttggctacccacctcttgcttgagaagctatgtcctaaagtgtccccctgagcactcacaacagagactcggcagtgacaactggggagccggtgccctccatgtggcattcctgctctgtcctagccccacgggggccccagacacgcccacacccgctggtgacaaactcggcctccccgggtgctgtggctgctgctcttgcacacacatcctaaaacgcaaacacaagcaggctgtacgcacatgtagagtgtctgtgcttgcacatgagcacactcgcctttaagcagaaagagcgccacttgtaagctgcccaaaaacgaaacaaaacaaacactagccaggagcaaaagtaaagcttcattccaatgtttaaaaaactctgaaagaggctgggagctgtggttcacgcctgtaatcccagtactttgggaggccaaggcaggtgaatcacctgaggtcaggagcttgagacttgcctggtcaacatggtgaaaccctgtctctattaaaaatataaaaaaaattagctgggtgtggtggcgcacgcctgtagtcccagctacttgggaggctgaggcaggaggatcacttgaacccaggaggtggaggttgcagtgagccgagattgcaccactgcactccagcctgggcgacagagcaaaactctgtctcaaaacaaacaaacaaacaaaaaacaaactctgaaagacgacttcactcctcatgctaaatgaaaaggcaagagtttaaagcgcaggggggcggtataggggggtggtgaagaatgaagtgcgtttgttgaatttgtaaaaagacagagaaatattttgttacctcaagggtgttttttttttatttactgctttccaagtcaatacaaatgtttaccaattaagttcatttttttaaaaaatcagtaaattgaagttttttttttactttagtatttaagtaacttccacttaccagatcccaaacaagctattattattattattatatattattattattgacagcatcttgctctgtcactggagtacagtggcacattcatagctcatcataaccctgggctcctgggctcaagcaaccctcctgtctcagcctcccaagtggctgggaccacaggcacacaccaccagcctagctaatttttatattttttgtagagacagggtccacctatgttgcccaagctggtctcaaacacctggattcaagagatcctcctgccttggcctcccaaagtgctgggattacaggtgtgaccagtgtgcctggccccaaagaagctatttttcatccctctgggacctaacaacaggcacaagggggaaggtagtgagctagagccgtcttcccctccccagcactggcgaggatgctcacgccgtggggagaccccaccatcggcacactgccctcccttctgactcaggcaaaatcccacctcctccatgaaacccctcaagtctacacttcctctcatttttcttttctttctttttctcttttttgaaatggagttctgccctgtcactcaggctggagtgcagtggcatgatctcggcttgctgcaacctctacctcccgggttcaagcaattccattgcctcagtcaacctagtagctgggattacaggtgtgcaccatcacgcctggctaatttttgtatttttagtagagaaggggtttcaccatgttggccaggctggtctcgaactcctgacctcaggtgatctgcctgtcttggcctcccaaagtgctgggattacaggtgtgagcctccgtgctcggcctggttctctctcttttctgagttatagtcacaggcagtgtttccaacacagggtgtggccattccatttcgccatcaggatccctgggtttctcatgtgtatcagctctaccttcctgccaattgctcgagagccacttgggaaccagaacaaagtatccttccctcttttcccaagtgcccccagagggctcgcgcagagcagacaccacgagtggcacagggaagctgccccctgccccacacccagcccagggaggcacagagcactggaaacttccatgggtgggtttgcaccaggccaggtgtatccatcaacacatcctgtaatcctctctacaactgtattttatgagtgaggaagtaagattcaaatgggttagacggatttaaacgtatccctaatccacctcttaatgaccccacaggctcagggcaagagctgaggggcttggctgactgcagcgcctaccccgcccctccccagggctgccagtgttagcaaagaaaaatacaggatatgcagcttaatttgagtttcagataaacaacaaataatttgtagtactagtctatctcaaatatggcatggaacatatttacactaaacactattcattgttaatctgaaattcagatttaactgagcagcctttattttatctagcaagctactctccacatcctcccccacaaattccaaagagcatattttgctgaaggtgaggcatagccttcgaaggaagggcacggcacctgcctccccgctggctcctaatctctgcacccagacaggccaatcacatttgaacaatttagcagacactccttggaagagaagagaaaatcacccacctctccaccccgactaaggcaggaccataggatggggctccagggagggctggctctgcaggggcctcttggtggctctgccaggtttgactatctcctgcacttcgtaatttgggtcattttttttttttgagatagggtctcactctgttgctcagggtggagtgcagtggtgatcaaagctcactacagcctcaaactcttgggctcaagtgatcctcccacctcagcctcctgagcagcaaggactacaggtgcacgccaccatgcctggttaatttttgtattatttgtagacagggggtctggctctgttgcccaggctgatctcgaactccagggctcaagcaatactcctgccttggcctctcaaagtgctggaattacaggcgtgagctcccatgcccggcctaggtcattgatgtttctttattttttttttcatgttggtattcagtgtccttatgactgggtgtttgccttttctctttccgacctccatgcaccttaacttcatgaaacatagcaagcatgctgtgctcatgaaacaaaaatacttcatggtactggaggtttttaggggtgtggccagctagcccagcttcccacccttacaacgatatcgatatctgaagcaaccaacaaaagcaaagcgagggtgcagcagtgagcttggaaacagagagcctggcccatcagcctgggcctgcagggaaccaaggaacctgcagggaaccctgcacccagctgggcacgctcatcagactgcaatcccgccaacaggtgccactggaagctgctcaccagccccgccaagcgccgcaccctggggcccccacccgtcagcttctgcaaaggtgcccgcgctcagcagggacgtgaacagttttcttgacactccatcctcattgaagtgaaatccacgcagccagcatcggagacgatgaaatgggacaagctctcaccgctgcccgtggagggatacctggctgggactcaaaacccctattacaaaaatcagaccattaaaaaaaactagccaggaagaagccaggagatttccctccgccatctgttaatttatagggttatcggtgtcagcaatttaggagaagttaaattatatcacagccccactcacaactctgccatggaaactcagaaatgtaatcacaaattttaattgagaaaaattgctctggatcaaattccttttttttttttttttaagaaacagattaaattatgttgggggaaggggagtggcaatatgagtttgaaattagttgtgataaaattgaggtgtgattgtaaaccaatttgtgttttgtgtattgtgagtaattgttgggagagagaagcctgtccgggttatttctgctgaatgccgcaccgtgcctgggaagaacatcagcttttggaaacagaagttcacgtctcaggcaaaggaagggaaaggaataaatggccgaacccctcctaagtcaagaaagacacacatttggctccaaaggtttgaaagagggtgacagacagctgtcaccctccctctgctaacatcaggctgttccccagacccacccatctgcagacaatttctcctggaccaatcccatcctcggcttgccactgcccgacctggcctcttccctctccccaggctgctggttggcgccttgatccatttgccatcggggctatctgagacgctcatcgaggtgcttacccgctaacagctctgtgcaggtggcatgagcttgcatcccccactgccttccttgtggaaagattaaacatctctcagatgctgggaggaccctcacggtggcccttggttactggagtcaccaggacctgcagcaccttgccaacaccctggccaccacctcctgcccctgagcccgcgtggctctctgtgccacagctggagagggcccagctgatcagcagctctgccaggcactgtccagggcttccctaagggacatgccagcccacgtccatctctcctcctcctcccagcatcccctctctttcactctgccctcaaacagcatttcactccatcattcatttcttggtctttgggccaaggtcatgtgtgtgtgcacacgtgtgtgcgctgtgcaggggtacccagtgtaactgcctgcacttatttatttagagaagcagaggaagtggaggtgttgccagttcttgccatttcatcttgatttagtcatttttatatggctcacaaggcataggcagatttctctgtttctttatttgttcattaaaacttcaataaaaatgttataaaaatgtcttattttggtagttaattgccatttccattttaatatgcaagcggtgttggctcttctccgagattcttcgagtctctctgtaaataatacagctgccttggacgaatgttccctgcctgctgcgtatttactcagtcatcaaagcgcaaatgtggtgggtaacagatcactcccttcgagagaatccactccactgccagctcacacacagccctccacgggccacggccaagcgctgagccaacagagtttgcctcctgcctcacaccggggtctttcagcctgaggtgagcgccccagagagcttcccaggttctcagatattttcctgcctttgggaaaatgcatctgtctccctgcgtttctctgaagccagaatcccggcccttcagggcttggctgagatccccggccagcgtctgcgtaggacggtgggagaggctgagtgcagcgtctttcagagccaaacagagccccagctctgaggcatggggagaggatcacccaggggaccagggggtgggggtggcggtgggcgtggaaggccacctgcgctgggcctggatggcactaggctgaggggagcagggggagcagtgtcagcaggggcctggctgtggcttgggatggagatgggagcctttatgtcccgcgtgtgaggggcccagaggcctctttgcaaagcttgaatacctggcgccccaggaaaatgagagccggcctgccgggcaattgcttcctgtgacggagccagttactggcacctcatctccactggctctgagctgcacaggctcattagagaccatgggatggggcctccgaggagctctgggactgctcaaggccaccagagctggaatttgttgccacagctatgagagaggggtaaagcgggaacatcagacaaccctgaacgcccggctctgtgtgcagacctcattctcggacacttcgaggccacacaggtgtgagaggtcccactccccaatctatatccccaaatgctggtgatgtcctgtcctgagtccaggacccctctagggttggagcggggtaagccccagaatatctcacaagccagagtaccttctccaagtgcagaaaacggagaattacgggaaagtaaaaattcagaggcatgacgcttgcacatgcgaggtttctgggccatagtgagccgcaggggaggcacgtggctcctgcaggggagatggaggggaggcacatgactcctgtgtctgaggtggctcctgcactcctgagcgtggccaggggttctgtagtgccagcaaggctgatgcacagagaggggacatggctcacgggtgacagttagggtcaatgtgcagaagaaccaggggactctttaaagggcaaatgcgctgtgaatggagactctcttggcaacgccagggagaggaacaggattcctgggatacccaggaagtctgtgggctgttccctctggaaatagggggctaaggtgttcccaggcctggtcacctccaccccagacttccaaactcttctgtctggctgcctcctcggctttttcaagaagcctcagaagtatctcagaagtatctcagatcttctgaggatgcccaacacaaggctcaattccccttcctgttcctgcccagcttccctggggggtctccgcgagcaacatacctcttacccaggggcccaatcgaagatctagggccttcgattccctcctttccttgatgccagtatccaggccaccagcaggtgtttcagggacctccgacacgcctccagagcccccaacacctccagagccctccagcctccatgctcagcccgtccgccccccagcagcctgggtctgactgaggaaggtcaatcagctcgcacccctgccccactcagaactctctggggctgtccactgcactgggataaagcagacgacgggctcctgcagcccctaactctccccacctcgtccccctcacccactccactccagccaccctggcctccagctcctccacaaatcacagcctgtgctccaccacgccctccttttccaccaggctttatggggctgtgccttctcaagcctcagctcagatgccaggtcctcagagaatccagccctacaggaaacagccaccagccacccaccccatggattttcgggacagcacgcaccactctgggaccattcactcagtcatttaaacagccccatgcccagaaggcaggctccgtgggaactggtgttcagccttcctctctgctccacctgcctgcccagagtaggtctggcacaaagtgagcagagatggtagccatcagttgacaggatcaccaaatcccaaatctccatttcctgttgttcctggcatgctgttttaggacagtcctgaactggacttgcagtctatagaagacacacgcttgggtgttccttgaatgacggggctgatggagataaagctgccattcagatgcaggtggactctgaactctgcgaggaaagagatgctctctgcagctggggacagtgctgctctcccaggccaagcacgtctcccaggcatctgatgggtcagtgcgcagttaatgagtgtgttgactgcacagacactgcgtgcagctctggggatgaaaagatgcgtaagacaaaggggccaggggttgaaggatgagggtgtgctggtgggtgacggggagcgggcgtgagcaggtcggatagcctgctgtttgctttctggtggggaagcacgctctccactgatgggggacaccatatggggctggggacctagaggaacacattatagcccatccagcacagcctccagggagaggaccccgcaaagccccaggatgactacccagcccacgcatgtggccttacctacagcctgggttgctccctcagctggagaggctaccttgtgtggccagaaccactcagtcaatgtgaggctgactcctggtgcccagggagtggctgggcaggagccacccagctgcagtgcttgggcagcagtcagcccaaggctcagaaaggcagcatccaagcaaagggcaggatgctccctgggccagtcttggacacattaactagagttggtgggggaggcttgtctcttggtatttattgggcccccaataaagcctctctaccctcaacactttagtttctgctctggatgtgcgcacacacacacacacacactctctcatgcacatgcacacggtatttctggggaaaatcttaactccttgctcttttcaactcctttaaaaaaatcactttggcttgttccagtttcatcctcctatgaacaaaatatccactccagcagaagtgggagggatgactgtaactgtggggaaaaaatagcatcccctttgatgttaagtaatacaacaaactcctaaatgaaaatccactaagagaaaatgaaatagaaagctgcctgggcatcaaaaattgcaaaatgaaactgttaaagaataaaactcattaaatgcctgtgataacactttattttaatagtacatttaattcatacttaattccaatgtgctctagcgcggccctggcgctcccacgcgaacaccagataaatggattacggcaagccaggagacaatgagtgcccactgaagccggcgcggcggcaggtgaaaaatgctttaacggaatatgtttcccatacatgaatcaccagcatatttgataacaccttccacagaaataaacctgaaggaatatatcttccccacactgacaatgtagattaaatagttttaccccatattctatggggacgctgctatctgatttagagctcacagaattcacaaggtaaagagggcaggggcaggcacctggcagggtcaaggggctatagtgtctgctgcccgagagggaagggggcttgccaagagcacagcggccacacctctgggtgcccggtaaccatggagatggcagcccttcttggataccacactcttgcaccaaagacgccatcagcgtcatgaccacgccacggatgtcctgccactgcacatttctgatctgaaaccaggagggcagcacacagggatgcttctgcccacaggggacacaccatgctgcagcctggagcccctgtgctgaaagtcaccttagggaaagcaagtagagcaagcttcaaaaccagcaagacagaggcatcaatcaacccggtcactaggaaagctagctgcatagctgacgagaagcaacccacgatcagcctgtggtccaagtcatgcccaggcaccgcactagtctttctggtagacgatcaggcatctcgggcaccatcactggtaaaggggctgctttctgtataaagaacagcagagcccagccagtgactccctgacctgttcatgcctgcagaccgtggctgtctctatactaagccgtttctttttctttaaagtgtttatttaattctaaaggaatgggtgggatctggcagctaacgcctgctctaaaagcgagctgtgattttatggtatattatgccggcgccacgtctcaatctatcaaagtcagtgtccccagagcctgagaaatcaaaacatcatgaatagagcaccacttcccagctcctgctgtctgccggcgagagagccagcccaacgagcagtgccttattgacccttccatcgtgcacagtcgatcccagccgcctcgccgccagcccagcatctgctcaactagaggaggatgaatgcagggccccagcccagcagaggcaatgtttgaggagctggaaggcttctgcctgtggacactggcaggactggggcacagcccagcaggacgacccttgtccttcctagcagatgttgtgctggcccacctggagccccttccggggagctgctctcaccccagctgctgggaccctgggcagctgaaggctctcagctgagtccctcccagagtactgtcctcagagagagccacctcgcccaagggccctggggagggtccacatccatgacaggtgggcaaaggggtacaaaggccatgccattttgcctcaaggtggggcagctccagagctacgcagaggtctgctgcaccgtgttgtgactgcctcacagcctcacacctcccttgcccaattctgctgccctcgctcccacatgagtgctgaccccaggcctgcatgtcaccttcgcagagtcggcttccggaggaccccagcctcagacaccctcctttccttcttctcttccttctcctcgaagtcctcctcctctccctcctcccctccccttctccctcctcccctcctccttttcttctttcatctcctcctcctccccctcctcctccctctcctcttcccccttcccctcctcttcttcatttcctcttcctccccctcctcctcctactcctcctccacatcctcccctccagtcctcctccacctcaagtcccccgaccttctcccactgcttgatccttcttcaaaacgcaaatcacattggccagattcatgcatgtatcacccagcagttagcgatgagcactcatgagctctgggctacaggtgtcaggagagaccgagacaagagaagacacacagtaagaagagtccgctttccctggttttaaggtttagattgcaaaagtcagatttactcccagccagtaacttgaaaatatttccccagccacctactacgggatgcagcagaggagaaaatggcactaccatccacccctccggggaggacaggcaaagggagccacggccagtgggtgtcatggtgggccggacaggcagctcttttggggggtctctgtggcagccaaggtatgtgacagaggaggaatcagagcccgcctggccccccaggaaggctgctcacctgaaggcagacactgtggacaatccaccgacaatcgttcactatgaatgggtttctcctgcctccgaatgtctgggacatcccggcatgactctgtgtgcattcagggctggggaattaacttcagccaaagacaaacaacaaccgagggtcagggacacctgaaattcttacaggagattctcagcacatggcaaggttagtcccaatgggatttgctttcatttcctgctaatgagattaagaggcgtggggacagaagttcctgtccacaccatcctttattacgcattggccctgtctttccttccacgggatcccacgggatgggttctcttacagaacaacttttcccctctccacagccgtgcccacgtcattctgcagaagggctgagccttatctaaagcaaagggagctgcaaagatgaggggtccagtaggagcagcagctgaggagagacctccccctccaccagcctggggctgtagccaggccacaccatccaggtgggggaccaggaagccaggatcctgcgtgctgtcctgcatctgggtttcccaatgtggcttcacaatgctatttgaactgtgttcatttccaaacctaggacgcccgcatttgcagatggacaaaaatgccacacttgggagtcagtcgtgggttccaccggttccccgcacctgctgccttggtctcagttcctctgcaggacaattgagaagcccgtgggtgggtgacctcatgttgccatgaaagacaccactccctggattgttaccatccgagaaggtgctggaagagctgaccagattccaagcagcaaccaacccagaggtcctcgcacaccagcccgatgctggtccgaggccccacgctcagcctccctccagccagacacacgggtgtccgggaggttgatcctcagccagggctgacaccattagggccatggaaatgtcatgatttcttttaaaatgagaagataaaatgaactttaagggccaacgatgcttttgtctttgtatccacactgtggcaaaatctacttttcactattttttgatggcaggagatggcccacacagggcccatgacaggatgcagccatgggcttcacgaaggcaggaaaaggcagatcccagtcactcgctcaccgccgcctgctatccagcccacggcccaccacacaaggagagcgaggaggggctccaaccacaccagctctgccacccctggacagcctgggggcatctgctctgagctgtctcactgcgcccagtgcagctggtgggcatccggtggcactgtgccactctccaagcacacgagcaacgggcaactctgggtggggaggggctgcccatcagccggggttgacctgtggcaccgggtgccaacaccatcttcccacctccccaggcacggcgccacctccacatctgtacccaaaggcaccggagtttctaccacagtctgcccccactccccggggaggggctgatgggggctcaccagaggggttgccctggaccctgaccgtgacccttgccgtgactgctgggggcaaaggacacgcgtttcggagggtttgctgttttcacccccagaactcaaatggccttagcaagacagggcttgtctggggatcccctcgaacaccaggcatacacaaggcgcctcctcccaggcctttcccttcctgccaccccaaactctgggtgtgtgttctggggcatggttggtgttgctctggttagcgttgaaagccgctcccctgccaccaccatcttggtcagttctgcccgcaatggccttgggagcccacgtgtgtctccaggtgattcttcactgctgttgcctcccctctccctagagggcctttcaggtcctgcagctcctggtgccaccccagctcaggctctctctgcagcctcgggaaagatcatctgcccgccctgatggatggagatttggtcaaacatctgagtgtctatcccctggccttgtccctcctgtcccctctttccctctcaaagaagctcccacggagagagaattccagctacgtcggtgcagagtggccttggctgagggtgagcactgggctgcaggtgcacatttctcctctaagccccaccagacgcccttcgttagatggagtttgggatcccaccaaagagaaggctcttggccagcaagggagttcacacctggggcctcgctggcttccagcccttcctgatgctccctgctctgtggtgaccaggtcttggtgccaaccccatcatcaccagagcacctctctcaccaggagccaacgctcacagagccaagaggaaagaagtcactgacagcacttggacgtcagaaaatcttccagatagattccccaaggaagcaaagctggagacaccactctgcccgggttgccacgtgtgcagccctcccattcccagcagggccagagccccacccagtgcctgagccccacccagggcctcacttgacacttgcagaatgcacttgctgccacctcaatgctgtggccaaggtggacacatccgaccatgctcacatgctcacatacacatgcacacaccctgatgtgcacagtcacatactaacatacactcacacacgtgctcactcacacaggcacacacacgtacacgtctctggtacaccctgaaatgcacacatacactaacatacatacatgtgtgctcactcacacaggcacacacacgtacacgtctctcatacaccctgacatgcacagtcacatacactaacatacatacatatgtgtgctcactcacacaggcacacacatgtacacatctctcatacaccctgaaatgcacggtcacatacactaacacatacgtgctcactaacacacacaggcctacgctcacatacacacgcacatgtctcatgcatacaccttgacttgcagtcacactcactcacacacaagctcactcacatatgcacacaggcacatgcacacacatgcttctctgggtccttagttcccagggccaagcaccttatctggagaaaccagtgcccccatgtggggccaagccaagaacacctggagctcccagcaggtgcttgtgactgggaaggcacctttcctctcctcccccggtagggggttagggagggaagggggacatgcacggcaggggacttggggaggcatgcacggtggggtggcttcccaggccagcacggtgtccctcctcctgtctgggtgtccctgggccacctgctctgcactggggcctgggacctccttctctgcctttcttcactgagggaccatggcgaggggccacagtggcggccctgttgcctccatggggcagattaaccccactttgctctgcctgggcacctgggtttggaaggttctggtacgttccactgtgaaatgggcacatccgaagggctgtgaatatcttgctgctttagaacaaatgaggaagctttgcccgtggccagattccagaggagcccagggcttccgtcttcctcagctgagtgcccatgctcgccctcccctttcctgctccctgtgggggcaagagctccctggctgcagagtggcccttgttgctgggctccatagaccccatgcagtctatcaggggctttggctcctgaaggcagagcactccttgctgctcctgacaccactctgtttaaagagaaaatcgagacgcccagagtgtccagcagtccctagggttaggggccactcgatgaggaaggtcccaccaaccaaatgtggtggggggacacgtgtcatctccaggacacccccagcagccctcacgctctttcctcttctcgaaaatgtggaaaccacgtgttaaagatggcagatcctgcaagtgggagggactggggcttggggtcacccttgggagcagagcctcgccctggtcagccgtgccctgagggacctggcatggtgagaagcgtgtctctgctgtgtcacgacactgagatggggagctggctgtccccgcagaaagcattgttcaattcataccaaaaccaggatcagaggatcgaggctcctaagcaggccaaggagaggtgcagagcaaccacagcccacaggcaggttcggggagaccctccccgcagacgcttcagttacaggcaggttcgaggagaccctcctcgcagacgcttcatttgggcctagcacggtgaatgcaccctctaaacgccagtaactgcgaggatgactgtggccacggcagccctcagcaatgcgctgcccggtgctgtgagggctccttccccaggaacagcctgccccggacagcactgcctgcccgcaggactctgtcagctggctccccagcctgtcctatggcctccccatactatccccggcaatcctatggctcccctgggtcctatagcccctctatactatagacccccccctgtcaaatcccccccatcctatgtctcctcccaggtcctacaggccccacctccccatcctgtggatccccctaagccctatgggctcccccatcctatggctctcctcagtcttatgaccccccagttttatgtctcccccctggacttatgggccagtccatggctccgcctctgtgtgatggatgctcccaaggccaggcctggcccgggctcccacccctgcgggtctttctccattctaaatcccccccagatccctgccaggatgaacagcctagctcagcccagtctcctggctggaggctctgggatgtcagctcccccatgtttcctggggacttcctccccacccacaggggcagggcagggacagacgtgtgagacacacctgattaacccttctcatgctccagaaaaaggggagtctgggcagggactgttgcccacctttgcgtgggcatcaggaggaaccagcatagaggtagagctgcgtgtccaactggccgcaggtgtgctgggggaagctgacagaaaacatgagtctgttcctgagatttttctggtgcaattgcgtgaaatgagtctataacgcagagcaagacagggcagaaggtgggcggggactggcaggagtcaggggctgataaggaacaagggccagcaattagagcccagcccagggtggatggggccggcccactggacttttatctcactcctcggaagaggaagctcacgtcgcctctcagcaggtggggcagaggcctggcctccaaagcttgcagagacaggggtgacggcaggggagcaggttgattccaaccccatttccatgtgttacaaatgcaccggactcccccagctgtggcccaggcctcaggtccatgaacccctccaagttcttccctctgtcctccccacccctacggcccccacacatacatactcaactccagctccttaagggcctagtcgacacctctccccacatttccatttggagaaaatgaagctcagagagggaagggggcttgccaaggacccagcccaaccctaccaggcactcgggctgggcgtgggagcatgtcacgtgctcagagcctctgatcatgaatggcagcaccagcctgaacccatcctggctccattcagaacacacctgaaatcctttctccaaagtgctctgtgaaatgggtcagaggggccagacgggtgcttacctgaacacacatctgagcatttcgcaaacactccatctgaggacttgacgcctgctggcctgaatctgtctcggtggttttacagcccacactggaggcccctggggtgccagcatcatttttatgtgtgagttccacacggctgctttctcctggacagagctccccctcaacccccgagcaggagccgggcctaccacctgcccagcaagtcacgggccaccctggaaggacacaacctccttcctccagggcaggctgagcgcagggaccagtttcctcccatctccctacggttttgtgatgagttttctttttttgtttttgtttttgttttgagactgagtctcactcttgtcgcccaggctggtgtgcagtggcgcgatctcggctcactgcaacttccgtctccagggttcaagcgattctcctgactcagcctcctgagtagctgggattacaggggcccacctaataattagcccagctaatttttggacttttagtagagacggggtttcgccatgttggccaggctggtctcgcactcctgacctcaggtgatccacctgcctcggcctcccaaagtgcggcgattacaggcgtgagccacctcgcctggctttgtgatgagttttctaagcacctggtgcagctgcttcctctacatggagcagattccagggagaggaggggctgacgaggagagtgggcgtgagagaagtaaagacgagaagccgcagcttcccagggcaagggaccaccatctcccagaggggtttccaggcgagggggctggtgtgtgggtggtggtgcgggggcaggctgctctgtgtccaggtagaacaaggctgagcctttcttctttggaaaggaccggctttccatgcagaaacaggatctgctaatagatgagaattaagaaaacccattaagctaatgagttgctgctgaagacttagggcagcaaataaaacctggaagggagggctttcaacatttgctttaatttaaattgaaccagactgatgagaaaatgcgagagctggctgcgcccaggtacacgcagcgaggttggcacacgcacggcacatgtgtacacgcttgaggctccgttcgcatgtttgcgggctttctccttgttttcacacgtgtaggtgtgcctggcttttaagaacactccatatcaaaacagataacttaaggaaagtgtttttgcctttagcaaaagggttattttctgggaaagatttctggcaagacttctttacagactgagcctcccccagtgcatttaaaatatgatttgattgaaagaaactctatttactctatttccaggcaacatccacagcccttgctcctctcagcccagtggcttccttcttcccagagccccaagctgcggctgcttccctctctccctcctgccccagccctacccacctcccttcccctgccgctccaccagcctaagggcaccactctcctcaccttgccagatcctggtcccctgggctcgccaagagccagcacaccaggtccctgccattgaatgacaccctgtgttcctacagtaatgtgacatccccgggagcaggaacacggtcctcctaaatcccgtcatttggtcaagacaagtttcctccaggagattccagagaagagtcagtgaaggaaaatcatttcccaggcagctggtcaacaagccttgattatggatcaacccacgctgcagagacttgtggaaggctggatgggtaaagaggggacagggccctccctctaagaagctgctggtccagttaggaagacagaagacacacacacacacacacacacacacacacacacacacacacgaagctcttcagtgctggggatgttgagggtgtgtatttggggagtgttgagggtaatcagggataacatactctcggcccccaggggaggccccagaagcagggtgacgtgctgggctctggggagggagcagcgttctgggagagctctctgccaccttgttgccatctcaactcagggtgggacacacaggtgtgcaaaaagtttctgggggctgagcagactcgggcaagtggctgcagtgatggaggtggggtgagaggggatggagttgcccccttggaggccataaggggcacaactctgatacccaattcaacctcactgccagcatgaaacccctcctttgaaaggggccgctgagcccagaggctgcaggacacggcccctcaccgtcaggtccatgacaaggtgagcctgcctgcttccgggtgcctgggttccaatcctggccctgccccacaccagctgtgtggcctcgggcaagttatttagcttctttgtgcttcagtttccttggctgtaaaacggggagtgcagttgtgcttccctcacagtgtggagcagggatttagtgagattctgtttgtagaatatgaagatccatttccagcacacagtgaaagcacaataaatgtagagacgattctcgtcctgatcatgcccagatgtggagtctgaatgccccagagcccagccgaccccctcccaggcagcatggtggccctgtgtcccccaagtcaacaccccctccttcctttctccagcagcccctgggcgaggagactgccttctccaggtttgtctctgtccactggtcccagggactcccagcctggaatcgactggttggaatgaaatgatttcctcccatttttggccccacttggaaaggagagagaaagtccggtctctgttcctgaagctgccttcccagtcatgggtcacaagcaaagaggaggtgtgggtggagagggaaggtgggggtggcaggggccggccaggcacccgcaggaccctctctctgcagatactggggagactggagctgccaacatgaagaaagctgggcctcaggtgggaacccccaccccaaaacacacacagccaagtgttcagctgaattctttttcaaaatattgtaagagaagtcatattccaccgtgagcaaattgactcaattaaattaccagggcatccccggcccagcccactgcgtgtttgctcagctctcaggagtgggagctgctgtcttgcagccagggccgcacgggggctggaggaagaggaggggtgcagattccaggtccagtgaccatgagttgaggaccttgttttcagcaggtggggaggctcgcagggggatgggggtgcttctttcacctgttcgcttttctgtctctccactgtggagacatcgtgagcacaaggacaatctggtttctcagggttccattttcacctccctggaaccccgagatgtgggaggttgggaagcccccattctcttctcccttgctcagtgccaccccagcctggagcccgacacctgccctcccgccagtacctcctgaggaccaaggctcgctgctccctccagcctgcttgcaggttgagtttgggggtgttccgtgttgttcttagagaaaccgcagtgggcaaaacaccctagaccaaaatacaaaatatccctccttctagagactccttttcctaattaggctacttctggggcatggctctggctttccactgcccagctggtcttgcatatttgtctagacacacagagcacacgtgtacacaaagatacacacacactacacagacgcacagagatgcagagacgtggaccacagatgcatacagacataattacacagagacgcatacagagccctgcatggacacgtgcacacggagacacaggcactcttacacacagacatgcacacccacttgtaaacggaaacacatccatgtggagacacacacactcatacacacacagacatgcacacccacctgtaaacagaaacacatgcacgtgggcatgcgcacgcacacacacacaccatgctcagcgacatcactccgagttggtgacatcctcctgacagctccatcgcacccatgctgtaggtgcggcggccgaggaactcccctttggtaggacgcagagctgcactcaggcggttccacggtgacagccggagcagggagccagaacggcattgtgtccacgggggaggggcatcgagcttctgagtgccagcattgtaatcaggggcttgggacaccgcttggggtcctttatttgcccctctgccctgcatccctttggaaactgcagaagcccacggctttctaggtgtgcgtgtccctggtgacccgaggtcgctgccctggtggagggcagcctggaaatgtgtgggcacttggctgcctgcgggactgggtcacctgagaattcccagcactctagagagggggcagggcatatctccgtcaggcccagggcccatacaaatactttcatttattttaaaaacagaataaacttttaggttagggaaagtgtcttaatataggataggaatatattcatttttataccaatgcagtcacaaactataatatttctttatggaggaagcggattgtgaaggcacaagtgcccggaccccgtgactcccaacacagcctctgagagcacatccatctcatagggggggcgcatcaggggtcccagcgggtctccaccgagcccagagccctggaaagcaccgagcctccccgtaggggcttagccctcatcaccactctggacacaaagaactgagcctctcccactggtcctagaagactcttctcctagaagagtccaagaggggctcagagaaagggacagagcagctgactccctttctggagcctggactagcttcatgagggggatcccactttagtaacacatgagttagacacaggcatgccccagaccataacttccatcccaagaacaggtagaggatatatttaaataatacgattgagagcattaaaaaatatcgcacttgcccaggtgtcggactcgctaggacataacccgtggccgcccttttgggattgtgttcacagaccccaggaagccaaggacagggttcggatgggtgggctgagcccgggacagaacctcccaggtgctggggctgtgtggggggcccggaaaaagaaacctcctctcgctctcctgctctgcactctcctgtcccccagcctcacctgggagccaggctgtgtcccatgttaatgcagctacttcacacaattaccccaagtttctccagtaggggctaatggataacatttgctaatcacagcacattgatctcagcctcgcccccggaaccctttccccactgaaaggctggcagggaacatggatcctgctctccacagccgcacagtgggtacaggggtggggagtctggtcaccggcacctgctatttgcctctgctccagccccagggcccagaggccccgtccaggctgcacaagcttcggaaagcgggtaggagcctgggttccgtgtcccagccctgggtctgactctggccatgcctcctggggagggggattctcaactggggaagctgtcacaggggcgatgtccatcccaagcctgatggacacgttccaccacctctgccactcccagccccatcctggcacaggagggcaaccgtcccatggcacgcgtcggggtgagccagccatgcgcttgcttatttgtggctgctcagctccacgcaaataagggtttgcctgtttcactcccagggctcaggatgggcccgcacattgtggggtcactgccagaattcccgactccttgcctgccctggggactcaggtctcggggatgacctcctacttccgagagctcacaaaatcctcctatgaatggaaaagtcgaagaaggggtgtgttctgattctaccccgttttcgttttgttttaaggtcctccctcgttcacctaagggagacacacacttgtctccatcttcacacctttctcaatgtcctggattttctacattaagcacggatggctgttttggtcaaacaccactatcattttaaccagagagaattacaccctggccttgaaagaatgaacacgggtgagcagggacctcggagactcagcctctcaggggccggcgttccaggcgggaagctggctccagggctacactgcgcttgtggtgagggccacacagctcagcccccgcaaatcccggatggactcatctgcgcccccgaagatggcttccctcacatccaattcccggtccagatcggactccagggtgtttcatgatttcaggcccccaagatgccatccgggtcctcacatgtgacctacagtcccctccctctagttacccacctaagaagcacagagcggctctcaggcccgcacgagtctgcatgtgcgtcctgcagctcctcctgccgcggcctctcccgcaccctccttggtacagcttctccctccctgtccgcacatccccggctctgctgttctgcttctcttccaaattcttcccctccatccctctttgagtccctctgttagtcacctcccacagccccactgcagccccttcctctcctagtccatgaccgcatggccatcatctccatctttcccccaaccctcagcatctctaaccctccccgtctggctcccccacctaacaaatctccacaatcccccccttgccacccctcccccaggctgccaagcccatctccagcacacggggcagatcttacagcagaaggatttaattgcatgtcaaaattaaatctcttttgatgaagaacaattcaactacggctctgcctaatcaaattaacaaagtcttttttaattttcaattatcttcttcacaggaacactttatccaaggctcttgtgaaggtggccgacaggctgtgcattcacaatgaagggccctagcctggacctgctgaccgtggccctggctgtcagcgcccctggcctgggagagggctgcacaacccctggggtctgcccagagcctccttggcctcttggaagcctttcctagatgctgagccagagagcagggaccgtttactgcagcatttgtcctttggaaatgggagaaaaatgggtgaggggcaggcactcaggagaaggggctggaaatcgtggggcaccagctttgcactgagaaccaagctgagcattttggatgcatttggtgagcaatggatccacagtggccctcaacagaacaggagcctgggttctacctgcgtgctctggtgccctgccaccacactttctaaacacctccagcctccaccacactttctaaacacctccacgagcacttccgtatttggacgtcgctccacgaggcacctgtgtcggcagacattgctgccccaagaccagctctgtcccgtggaaatgcaagggagccacacatataattttatatttcccagtagtcacattaagaaggtaaaaagaggccaggtgcagtggctcatgcctgtaatcccagcactttgagaggctgaggtgggcgaatcatgaggtcaggagatcaagaccatcctaactaacacggtgaaaccccgtttctactgaaattacaaaaattagccgggcatggtggtgtgtgcctgtggttccagctactcaggaggctgaggcaggagaatcgcttgaagctgggaggcggaggttgcaatgagccaagatcccgccactgcattccagcctggatgacagagcaagactctgtctcaaaaaaaaaaaaaaagtaaaaagaaacacgtgagattcatgttaatttttttcacttaacctgatacattctaaacattgtcaggtcgacatgtgatcaatgtaaaaaccatgcatgagatggtgtacatgtttttctttgtacggagtctttgaagcccagcgcgtgtgtccccatcacagcacctctctggctgcactgtgagtgctgaggagctccccggggctcggggctgccgtgtcagacagcgcatcctgggccacagacgtgttagggccggtcaggcagggcatcttctggtgtccatgttcccctcaacccacacaccgggcctggcatccagctgtgcggaacaggcacttggtgtgtgaataaactgaccaccttgtacgacttcgatctgttattgaggtaggggcagagttgggggcaggactctcctgctaggggaatcacccctcttttcccattttctgaactctgagggcccctcagcagccagcagtctcccaggcaggcctcagcgccttcctttcccatctccaaatgttgcagctccctccctggacttgagagccccaggaggaggttatttggaaacgcagacagaagggaaccagcctctcagcggggcccaggggtgcactgaggaaataaaaccgaaacccggtgtcaccatcatcacaaaacatatttgacaaaacgtctccaaggacagctcagtgctccatgcactccgatacccttccaacagcagccgccaacagagccccccagggcatggcagaaaaggtccagaaagactaaactcacacactgcgggacccacagaataggagaccgtgctgggcttcagatctcaccctggggtggcctagccatacccagccacccagactcagtttctctggggctcttgtgccaccacccaacgggagacgatggtcacattcactgaagcaagctttgggcaccaggcactcgttcatctgctgtccatggaaaccagttgtcaggacagcagcatccactgcccaggcttccactgcatccctgcagggatggggggctctagaccactccaggttgggggctaagccttccttgtgtcccaccaactgcgttaccaaacagcctgtatcttgtcatgacagtggcaaaaagtgtactttcccaagagcagcctgtgttgggcggcacgtggttactcctcagggggttcttgggcaaacctgtttcccatgtcctctagggcaggagccagaaaggctgacacgggcaggcggggcccctgtgaactggttccacatgtgcttgctggggaagccaacccttgcggtcatgggcaaccctttctttgaaccaaagacctgaccagattggccacaaccacactcacgcgcatttccaaggcttcagtgccagcatcctcgcaaacagcttctgaatgccattcacccaatgtggtcctgggcagcgccctcttgcctatcgcctcccaggctccttgcagcctgatgcaaaaggaacagggctcctgccatcctggcgtccatgctttgggtgcttgctggtggatgccatcaggggagcctgaatggggcatttccagaaccttgctgacctcttaatgaggtttagggtggggaggccagggtgactaacttgaatggctggtttaaattttcttaacgatgggctttagctattaggaccacattttctggggctgtgtgggcacatttccaaatcaatcaatctctgcctctcaaacacacacacacacacacacacacacacacacacacacacacagtgtgtagaatcaataccgcagccttcaccagagccctggggtccagtatctgattattgtcctcttgagatcacagcacagaagaggatgggaaaaggggtgtatccatagaccagggacaatatcacatcacacagcctgcctgggggcttccagccacccctcgcctccttcacccaggttgtccggcctctccccaggacaggctgttgtctagagggtctaacacggctggccacgtgaccactgcctccccaagcggcccaagaaggtgcaaaggcaccctccaccaccccacggccgcggcggtgcaccagtaaaagtagttaactgtatctacccttcagcacagagacttgtttgatcaaagatttagtcactttttctccccttccagcacaaaatcttgggctttcttgacagagaattaattgctgctgattaaatttcattgctgaaggaacacgcatccctggaggagtacccccccgatggctgcctcctgccccaacgtgtggaaagtgccccttacagagtcagagcatgggacacctgaggggttcctagggactttctgtgggtgcaaggtcaggaaagtactagaacatgtggtgggaatcatgatggttaatgcccagagcttggtgggtgaggatcaggggcaccccctggatgactgtagggcctggggagctcagtgtcccctgcccctccatcctggcacacaacacccgggagatgctgctggaagagcagaaagaggcctccctggccaacactgggtcctggcattccctgcctcttatttcagaggtgtagtggcccccgggacccccatatgtggcaaggaatgtcagaggggggggcaatcagggtatgtgggggaaggcaagattcagggtttggacccaaagccagacacggggctagaagccaggctttcaaaggtcagactggactctggaggcaaagcgggactcgtgtgagttctcgcagccgccacatgcccacagcaaggagaggacacctacagcgggctcagggcgagggctgtggccaggtcaggcaggtccaggcaggggagctgcactttctggggatgtcggaaaacaaagagggtttctgagcctccaggactcactctggggaccccggtaaggggagcgaggaaggtaatgaatctcccaggaggccgcactgccaggcactctctgtaggtctgttcagagggagctcttagaggctgtgggggagaagtccacccacaggacatctggccacgccctccctgtctatgcctaacagacttacttgcttgtaaggggctggtccacctccctgggagtacatttcctggcccaagagtgttcttgcagggtgactgcacagggggtttaagcaggctggactctggagaaccgtctgccctcaaaatgcccctctctgtggtatctgcaaagccagcttccaaacccatgcaagagagatgcaccaagaatcaaggggccggagccctgccagcaccctcctcaggcccacccaggcctgcgcatctggggaccaaggcggtcaatacagttgatgcctcgggaagtccacagacggccaggggtgaggcccaagcaggctgcagcctcatacaccagcgctgacccagctggcgggccagtcacctgccgtggaggaggagctgctggcaggctggctcccacccacaccggcccctgaacacagcacatctaaatactggctagcagttgttggccaagagtccagcggcaaaacgcatcttccgggggatgtttcagtggggagggagaccttccaaacttcggcagctacacgccggctgctgcccacccaaattctcccagcattatctggggagaggcccagaaggtccctggagcctcatcagattgcccttccagggcctggttcagaggcagggctttgtggtgggaccaacatttcccggcccctgccaggcccttgcaaacccctcgggtcccaggaatgccctggctcttgggcccacctgccacaaacatcagcagcttgtcccaaaacacctaacgtgcatgggaaataactgggaagggcagagacgggaaggggaggacagagcctgggaagagagctctccagggtcccacaacaaggcagaaagaagcccttggcagctcaaaccagagcacccagcagggcggggaggctgcaagggaaacaccaggccccatgtccactaccagccatgggaagtcaggcaagacccacaaaggtcactgaaggaagagcttcaactttgccaagaagctcatggaggagcctgaaaccatcatccatcgagggtgcaggatgcaggacaatcagcgagcccccaagaacacaggtgtcctgtcctgccaggcaggaggggctgtgcctgttcctggccacagtgatcagagctgctggctgagcctggtcccccatgcccatctgagaactctcagtgagtcacaaagacagaggttcgctctcaaataccacgtgtgctgctccctcattctgtgagccctctgggtgggttctatcacccccgttacagacaggggctccagtacctcctgtgacagacgggctccatcagctcccataacagaaggaggctctatcacctcctattacagatgggggctccatcactctccattacagaaggagctccattacttcctgtaacagatggggttccaacacctcccattacagaaagaggctccatcaccctccattgcagacaggagctccatcacctcctgtaacagatgggggttccatcacctcccattagagagagaggctccatcaccctccattgcggacaggagctccatcacctcccacaccagatgggggctccatcactctccattacagaaggagctccattacttcctataacagatggggttccaacacctcccattacagaaagaggctccatcaccctccattgcagacaggaacctcctacaccagacgggggctccatcacctcccattacagaaagaggctccatcatcctccattgcagacatgagctccatcacctcctgtaacagatgggggttccaacacctcccattagagaaagaggctccatcaccctccattgcagacaggaacctcccacaccagacgggggctccatcacctcccacagcagacaggggctccatcacctcccatgacagaaggaggctccatcacctcccatcatagatgaaggctccacgatttcccgttataggtgagggctccatcacctcctgtaaaaggtggggctccatcactactttacacatagggaaactcaataagagccagaaagttactagtccaaagtcgacagctagtgagtggcagggctggaatccaagctggggtccaaagccagagccctcatactatcaccatgatgtcagtgagtgacagaggaaggagcccccaagtgttctgttctccaccaggtcccacagagccagacaccttccccagagtcagtgtgagctcccggccaacaaccacgggcacctttccccaaggagttccttccccacccgacatcttggccccgctgttccctgcagcccttggggtccagcccctccaggctacccggccccaccccctactccaagcaggaccacatttctgactagcctgctaagaaggctaagttctcatgtctctacccaccccgcctagtggcagaaggccatccctagcagccatgtccgtgtgtgatgtggcaggaccccatattttgacatttgctgtctacttgggaagacaggtctacttatgaaggagaaaaatggaactcagaattggaaggtagatacctggaaggcagaaactctgctcttgcagaattctttttcactattttttacatgattttccccaccccattcacaggccagtacctctagtactgaacagggacaggaaagcaggacccaggggtttgagaggtccccagggctccctggggtccctcttgagttctagaagagtctttactgagtcctactgtccaagcatggggtctggccacactcatgcttacacacagcatttccactgcgtgacttcagtaatttgtttctacagtaaaaactgatctgatacagcctagtaaagggttttgtgtatctgagtgtgcttttcatcacaaaaaaaccccagcatccttaaaggttaagaaaaatcggtcctattattctaacaactcacaggcgtgagtcaaaacatgaaggcaaacacactctggggaacactcatcagagaccctgaaaacaagtcccaggtcttttaaaagcaacctcagctttccggcagggcctgatctagggataaatactgccagggcccacagggtcccaccgtcttcactggaagatggctggtaccgcccgcatgggctggatgagaaagctgaggccagagaggacaggcttctcccccaagccaaatacaaatgaggggccatgagctctgcctcactgtggttctcaccactgcctatgtgccatgttgttggactgggggcccccaggctgggtgcagtggggccacttctttcactgggagcaggaggaagattcttcttgcctcctgaaaacccataaccacactgcagggggcctgggcacttggagttcaagggaagagcccactccttcccaacccataccccaagagcaggaccagactaacgtgtgcatgggtatgtgtgcactgtacagtgtgtgtgcacatgtgcaagagtgtgtgattgtgtgtacgagtgtgcatacatgcgtgtgcatgtgtacatgtgtgcatgtacatgcatgtgtgaacgtgtacctgtgtgtgcatgtgtgaatgtgtacgtgtgtgtgtgtgtgcatgcaagtggatatgaacttgtgtgcatgtacatgtgtgcactgtgcagtgtgtgtgcctacgtgtgcatgtgtgtgcatgtggacatgtatatgtgcatgtgtggttgtgcatacaaatgtgtgtgcatgtgtgtgtgcatgtgtgttagcagctctctgaccacacagactgggccataactacgcagcccccatgtgctccatgggctgtgactggggtgggggctctatcacagaagagtcatgcccaggccagaagagcttgagagaacaaggagttgggcccttccagggcctcaaaagcacccaggcatgaccacggctgaacgaggatgcagagccagtgcaagatcctgttttagggagctttgtcaagggttactcatctccccacgcatggagcctgttccctacttcttccaacacacatggaatcgttttcagctgtgtccagatgccttcccacctgcatgcgccttacttagtcaccaaaggcaggcatttttaaaagagaagatttttaataaatctctaatctcttttaaaaacaggggatttaagctggctctgagcgcccctgctccaggaagctcactgcacagctgcgggctggatctcgttcccacctgcagcagcactaccctctagtggccacggaggatgtccacgtcccggccagggttcccggcaaggacacaggtggcagctcctcagcagccgcctccagccacccctcctgcacatgccccggtgctgccggagcctctcgccaagcatcactcacacaggtggccaccacagccccactgataattcatcttgcccgctaaccacttatctctgagctgtgctcaccgatcaccatcctctcccagcggcagggaacagattcccttaactcctcccagccgccaagccctccaatcctttagaactggggccttgcctctcagcttccttcgcctcctgcaataagcatttcagagggagacgtggccccaccaatggccttttctctacatccttcctccacactgaccatgaatgagaacagagacggagggacgaagcggtgggcgcgggggggcggtgtggcaagcaccgcgtcacaggggaggaaactcacttttgaagtttggggtccccttcctctctccctcgctgctcttccaggagagcactaaccaccaaacctcgggtcactcacccctttggtgtgcaacgagagttggtggttatgtgacatatggaggactgggggtagaaacacaaaggtctggggacccctagaatgagatgcccaaataaacagtagctgggtattctctggagcactcctgcccctgggaggccccctttctggacttttgacttctccccgtcagtaatgctgcagctggttcgtacttttcaggaactctacaagccagctgacagcagctgacagcccttgagggggtatttacagcaggggaattgacaaatgctacacatcaacctgctttagttcctttggaagagcctattgttaaacactgagtcccccaccctgcctcggcctcagtgggtctccactcaggtaagggcagccttaccgacacatgacacatgagcatgctgggccggtttccagactgcctgactccagagatctggggtgggacagacgacatgcctttcttgtacgttcctggggaatgccagtacttccaggctggggaccgtacttggggaaccagtgctcagtggttcatcagcacgaattaatttatacaaaggcacaaaagacaacagtttagaatgagaggagactgagggggccagggccatgctcagatactgcagggctggagactagcgttttctgtttccaaagcagagagggtttcagctgagaaggaggccttggagcaaccagagccaggtctccgcagcctccaggtctctgtagcctccgggtctccgcagcctccaggtctccgcagcctccaggtctccgcagcctccaggtctccgtagcctccaggtctccgcagccgccgggtctccgcagcctccgggtctccgcagcctccgggtctccgtagccagccacccggccgaggggctgggtccacagaggaggaccagcagcagtgaagggcaagtccacagagttctgaggtgtccaacctccgggacgctgcactgactttcaagtgcccagaggtcctcctagaataacacatccctccgccccatcatcctgcaatcctttagctggcagacaccagcatcccggggggacttcttagactccactctgagtttggctttgccacgctgtggtttcatcacgaccatcacggccaggtgacgggttccagctcattcggggctcagccccatctgcccactttggtgctggaaaatgcactcagagtccaaccggcgtggaaatacagtctttgcgccactgctttttttttttttttttagatggagtctcgctcttgtcgcccaggctggagtgcagtggcacaatctcggctcactacaacgtctgcctctcaggttcaagtgattctcctgcctcagcctcccaagtagctgggattacaggcgcctgccaccaaacccagctaattttgtatttttagtagagacagggtttcgccatgttggccaggctggtctcgaactccttatctcagacaatctgcccgtctcggcctcccaacgcatggcccattcaaagtttgccagaggcgagttcagggtggggatcctggcagtgggaaactggaggagcgcatggagcatctgagagttgaggcagcggaacccctcaccaggaggcaccttcctgcccagacacctcgggatgagcccctggtgggactgctcgggtgccggcagggagttcctggacccacccaaagccagctctgcttctcccttctctcttcccgctttcttctccacagccccctgattcccacagatccttccctggaaggctttctcgctgtctcttcaaagtctctcttctacccactgccatgggagccttcgcacctcgggtctggtggcctgtaacccctgccagccaggctccctgataccagcctctctttttccagacagtctgattaacttttctaaaacctcactaccactgtatcaaactccagcttctcttcaaccgtcagcgacttccccactgcttgcaggatgaaatccaaattccttagcgcaacccccaagctggggtctcagctccagcacctctcacctgaccctcaatgaccagctgtctcagggggagaaaaagggaggatttaaacccagcacacctgggttcaagcttcagctctccttcccacgattggtgaacactcgggcaggttacctaacttctctgagcctcagtctcctctgcttaataatgggtggtatcataacatcttcctgaattattatctaaaatgtcaagttcatgacttgtccgcccaaatacggcaaatgccaccgattttaatctcacccgaaaccaacctcacaggtgctgattcacttttaggaattaggaatttagttttaggaatgaagaaatgaggcccagtgaggtacatgtacacgtgcacatgtgcatacatgcgtgtgtacttgcctgcctgtgcatccacatatatgtgcgtgtgagcgtgtgtgggcacaggaaagtctgtgtgcacgtgtgagttagggtggggggtatgtggagacaccaggaccaccaacatgcatgacaacgagaaccagtacgcatgtgtttgggggacagcacacccccgctctgatcctcggtttccgaatctgttaaaaaaaaaaggctccaggctggacaagccccaggtcccctccttcccggttctgaagctcacaggtcgcgggtttgctgagaaggcacgtgctccccctggtggaaggaaacttgtatggcaacgctcccgccagggccccgcgatggtcaggctttctgccgtcttggaaacagacaccgacaagcaacagggttcccatagtgcccgggcacttcggacccgctgcgggaccttgggcaaactcttttagcctcagcaccttcctctgtgaaatggagccaacaacagcacatcacagagctaacagtaaagaaaactggggcagcctcctcacccccgtctcttttctcagtggttagttatgccaacgattgttccagaatccaaactcacacagcagagagaggcagctcagcacacggaccttgcagccagttggccctgaattccagccctgccacttactagctgtgtgatcctgggcacgtgatttcaccgtctttcattgtggagttgtgaagattcataagctaactctcacacggtagtgagcgcagggcccggccactcacaggtgcatggtaatgtcggtggtacaggtgtcttgtggctgtcactgaggttgttcataatctcctggctcctgttcctgctggagccacggggagctgcccttcccacccacttaagttaggcaccatcccgtgacttgctttgcccaacaaaatgggagcagaggggtgtcacttccagccgaagtttgcagaaccaacagtgtgtgcagtaccacaccctctcttcccgatatctggcaagcatcgggcagtggctctatgagcttgggtcctgagtgagggcaacagcacagcacaacaccctcaggaaccaagatgcatatgagccagaaatcaacccgcaattgctacagatctctgatgtggggttgtttgttactgagcataacctgctgctgctgactgagacactgactcctgcagagcttctctgaggagaaaggattccttctcatttatcctgacatgtacttactaaataggaatatttatcagttaacgaacacacatttcctttccccaaacctaaactaccaagcaagagaaccaccaaaatttgcaattccaagtgcatcgtgatggagaccaaagccccaacttgaccactacacagtctgcacatgtaacaaaattgcacctgtgcccccaaaatatgtaggagttgtaaaatatacacaatgaactgtgatatgagcaagagatagaacatagcagagtgcaaaggcattttttctcaaacacacaaaacctttatggagacggatttggggtttcacagttcagttccacccgcgtagccgcctgctgcagcacagggggaaagggaggcttggggcacctctcctacccacaccccaaccccacacttccacctgcacctaacttgcttgttagaagacaggagagtcgtggttacaatacactgggagggagatgctggacgaagcaagcctctcaggggagacccggccagtgagcagccgcagggaaacgctctccgttcgtgtggtccctggcgccacctcgcggcgctggctggcactgctgggagctggctcctggtcggcaatctgctcctgctcctggccagggcaatagcacactggatgctgagcgggtcatcacacacatcggagctggtcatcaatgaacatctgagccagtcatcacatacatcggagccggtcatcaatgcacatctgagccggtcatcacacacatgatctgagcctgtcgccacacatcgtctgagccggtcatcacgcacatctgagccggtcatcatacacatcatctgagctggtcatcacgcacatcagagctggtcatcatgcacatcagagctggtcatcatcatgcacatcatctgagccagtcatcatgcacatctgagctggtcatcacacacatcatctgagccggtcatcacgcacatcatctgagccattcatcgcacacatcagagatggccatcaatgcacatctgagccggtcatcatacacatcatctgagccggtcaccacgcacatcgtctgagccagtcatgcacatctgagtctgtccccgtgcacatcatctgaactggtcatcacacacatcggagctggtcatcagtgcacatccgagcccgtcatcatacacatcatctgagccggtcactatgcacatcgtctgagccaatcatcacgcacatctgagttggtccccgcgcacatcatctgaatcggtcatcacacacacatctgagccctcgcctgtgggctgagatctgcgagaatggacagagggcccaggatggaaaagcatgagggactcaaggacgacactgtgtccaggtccagggaggagctcaccctgcaccctgatcactgagacactcactccccacagtgcagagtgaccctgaggccagagcccagccaagcccccatctccaccactggggcaggggtctccagggccctctgagtgcaggtggggttcatcttaccccctggaaaacagtctggcttctatgtccaccctaggccggcaccctagtgcttggccaaaaatggagcaagccacgccagcctcaagggcctgtccttctccatccactccaggacaggaggctgacagtcaaggcagcacgcacagtcctcccagcgagatgagcaaatgaaggacgtgaactggaaacaggtccacagagtaaacaaatggcccccactctaaatggtcttgtctgaagccttggaccatgcctctttatccaagtctctttgcacagataattgttccaacactgaagcctgagcccccactgacccacacatctctctcctcaactaccccaggctcattggagccacagctctgccccactcctgagacgtcccgggccctcgctacatgagtgacccagtgaggtagagggatatgagaagagctaggagaagggcctggagacgcaacacaggcgctcggggcgtgtgcaggtgggacgacgcagagaggcggcaagacgtcaggaggtgccagaagggtggatgagaacccagggttaagtgcagccttccagaacagccttaaaggtggatcagccatcccagtggtggccacagctgctgtcattcagtgcgactgatggggatccaggcccgcaaagcagtgctctatctgggcctcccgtcaaccttctgccggagaccagggattcaaggatcagtggcaaagggctagatgtttttgttagtccctttgtttcatttgcagccacgatgagctgacaccggacccagcaatgtgtggcggcctctgtggagaacagctgcaggctctatcttgagcaagcctttggctccctgcctgggaggacccctcctaagggatggggcattccacacctggactgagcacagtggagccaaccaccgctcagtgccgggaggaaccacacttcctggggacctgctatgtgtctggcctcgcttaagctgcatcacatctgtgagccacacacggctccatttgtacaggtgaccctcactgaggccaaaggtgtctttgagaccctctctcctaagccaggctcagcacacaagccaagagctctgggctgtggtttacagtggacagcgaggttcccttcacactggatggtgacagctggcgcccgcctggcagttagtgtgtgccgggcactgatccaggggcttccagtgggtcatctcccccaaccccaacgggtgggactggtggtctttcgctttgcagaggaggacgctgaagcacaaggcagaagcgccttgcccaaggtcaacaacagcaagtggctgagccgtgacgtgaccaggagcccatcacgtcagccctggattgaggctgcctcggtgactcaggaggcttgagatcccctcctggctgtgggagcagagcatcctgcagaaggggtagaccctcacctgccagcggggctgcagctaggccatggggcatccctcacccttggtctggggtacaggtgcactaacaaggtgcacacaaggagccccgcctgccactggtttccgttccaggatccgggtctggtgtcatctggatgctcaagctgccaggacctgaggatgtctgagcccctgagtccttccccagaactctgagcatctcaaaagtaacagggcagggtgcaaagccacgtctccacctggggccggagggccctgcctccaaaacctgcctcccaccttcttttggttaccaccttggctgcctggacctccagtggaaggaaagatacccttttggatcaaatttggactgggcagagccgggggagaagggtgtggctgagctcagaacagagaagcccaaacttgaagctccctgtgtctgtgcgtctgagatgctgcaaagtgacctctgctgcccacgaggactcttgcttctctccctgctcatcctggccttgccctttaaaatgcagcatcctaaggaaaaggggctccccactccctgaaataaacctctgtcttctccagcacaatgataccagaagaattaagggtttctttccagaaagggggaaaggacctccttccttaatgcaaattttattctgactccccctgagaccccctccccagccctatgcccaccctgctctctaagtgggagggcatcctcacaggtgctggccaccccgtcattatccagagaaaaaagggacccagactcaggagggctgtcattgtccagctggcctgggtaggcccacctactgctcggagggatgaaagctgtccccctcgggccccaggctgtgggcaggaccagctacataatttgcagggaccatcccctcattaaaaagttgtccagaattcccagacagcaacaacagggcatgaaacccagcctggatcccttctgagtgcagcttccagcgcctccaccggtcacgggtccgtgaagccgggccagggtgggacctgtcatccatggtagggaagtctgcaaggagaacgaacccctgtcacagcggcagggaacgcgcaccaggctaagccgcagagcctgaatcttggaaatgcttcctggctgcaaggacgacctgtctcaaggggtggatttgggaataaagaaatacagctttgtcactttcacagcatcagtgtttccaggagacgcctccccacagccccgcggacaggcaggatttccttgccatagcatcactatttacattcaaataagtgactatccttttaagaagcgtgggctgggcgcagtggctcacgcctgaaatcccagcactttgggaggccgaggcaggcggatcatgaggtcaagagatcgaaaccatcctggccaacatggtgaaaccctgtctctcctaaaaataaaaaatttaaaaaaaaaattagctgggcctggtggcgcacacctgtagtcccagctactcgggggtctgaggcaggagaatcacttgaacccgggaggtggaggttgcagtgagccaagataatgccactgccctccagcctgggcaacagaggaggactccatccccaaaaaaaaaaaaaaagtgcgacccccacccccagaagtttagaaaagcccattaagagcctcctcgcatacctcatttcccatcaaaatcaacctagggcagatttaagcttcgggccaggtgagctggccatagtgtctgatttagagcagcccagctcacacctcactgacatcttttcctttacgacatggtccaatggctgagataaaccagctgcatcacaggagtcacggcagggacctgttaccacccccgggaggcctccaggacgtcggggaaccctctgtttttctggatacctttctcaggccacagcggtgggcaggggaggtgtctcagccttgacagttcgatgccagcaccgaaagctacaaccacaaacagaggccctggggctgggaagatggattttccgtcctggatcaccgtgagacgccgtcacgaatctgtccggcggcggattttcagaatattctcgtctgcggtcctgcacacccccacccagacagctttagggtacagacagtatcacaggagtttaaagaggaggaagactcggagcccgaacgaggctctgggcgccttgtcggggccccagagtcagggctttgcagctgagcagcaattagagcccaatctagtgctttgcaagaaagagaaaatacaagcagtgctgagagcagtcctgatcctgctgggcctcgggaggctcattatgcaccagaaaggaggcctgcagaaactcccagaactgccccccaagtatgggagcgtccagccctgaggcgctcctggcctagacgaggcttcattgcatcaatttgcaccacggtttcagaaaagtgggaaagggtgaaggtgtcccgtcaccccagaatgtggggacccactatgggatgtgaactggcgaggcctggcaggaggacacagcctgacgatatctgtcagcgtttaacatacgtacaccacataaaccacgtcagcggctctccaccgagagtaattttacctcctggggagggacacgtggcaatgtctggagacattgttggtcatcgtaactgagggaggggcttctggcatctggtgggtggaggccaggggtgctgctgaatgccctgcagcgtacagggcggcctccaccgtgggcgacgatgcggctcccacgtagcagcagcgctgaggctgagagagcggaattaccctgggagatgtgagtgcataaagtagtaagggcaggggcacagtggccatctacgtgatgtttaccgggggccagtcacgagtctgaccacttttcacctggggactcacttcgcccacccaacacacacagtgcacagctgaactgtgtccctctaagataagttgaagcgcaaacccctggtacctgtgaacgagatcttctttggaaacagagccttcgccgatgtaatcaggtaaagatgaggtcatagggtgagccctaacccaccatgactggtgtccttgtaggaagaggaaaacaccgtgtgaagacatgcatgagagaaggacgcatgacggcagaggcagggttggagtgacgcggctacaagcccgggaacccctcgggtggctggcggcccccagaggctaagaagccgtggggaggattctacctggagtctcagagggggcatggccctgctgaccccttggttttgggcttctgacctccagaatgttaaaaaaaaatcttgtgtttccagccacccagtccgtggcagtttgttacagcggccacaggaaatgcgtaccgtgggtgaggctatccccgcttcacaaatgaggaaaccgaggcaccgggaggcaaaggtgcgtgcccgcacacacacagctggtaaatcagcagttttgcttccgtgcacggctcgcgcttctgattagagtgacagcattgcaccagctttcatgaagggttttcctggcgtgactgcaggttccatgtggagggcagggatggtttttttttgccatcttttcaagacagtggttcagggaggacttttcaccatcaggggtcatcaaatttagcaaaatcccacacggtggccgcaccagggcccagcaggccacgctctcccagcagtcacaaaggagaaagcaaaaaaaatctacctttaattttgtgggaaaagtgctgctgaaaccaaaagacaatgtccattatgaaaacctgtttttaaactctgatgttctcatcaccttttcctgctggcttctcaggcagatgtagccgaggcccctccccggggagcagcagacaccacagaccctcgggcgctcccgtcttcagcaagcgtgaacgcgccgctggaaagaatgctggctttctctccaagtgaacgttgtccttaactggctagtgcaggacagtctaactcccgctctggaatctagacatcgtttcccatcactcaggaaaggtctggagatatccaggttcacccactgcttgtctctacccacagattctctcaggagtgctggagggacagtggagccactgctgatttaaccggtttccagacacttccaacactgcccctgggatcaggatcggagcaggattctcggggaatggggtttggagtggggaaaaagtctgacagtgaaacaaatgcaccacggggctctggaactccagaggggagccacaaactgggtggctcagagcaacatgaattttttccttcacattctggaggtcaggagccccaaaccaaggggtcagcagggccaagctcctgctgagactccggatagaattcttcctcatggcttcttagcctctggagccacccgaggggctcccgggcttgtagccgagtctctccaaccctgcctctgccgtcacggggccttttcctgtatgtgtcttcacacggcgtttttgtcttcctacaaggacactggtcatggtgggttagggctcaccctagtgacctcatctttacctgattacatccacaaaggctgtttccagataaggtcacgttcacaggtaccagaggttggcgcttcaacttatcttagagagacacagttcacccataacacccacctcacaaggtgttgggggtgggtgaagtgagttcacgtgtgacccgcgaattaaccacagttttaagaatgcagaaggctcagacacactaggaagatgcggctgtaagcggggtgtcccaaatgcagcagctcctgctctaatgcccgttgactgagaggtgggagctggactcacccctttttgggggcacctgttggccccgtcactgccctgatctgggagggtctctgcatcagtcaggccacctccgaagccaaaaccgaagtccccacactctcctaagctgggccagcccctcacaaagctgccacaacaccttgccacctggggagctcctggatgtgtctacagacagcctagctagcatccctgtgccaagagatcctcctccgaacaaaaacgagacaaaacagaaaaacacgtcgtcacaaccctacttccaaagctagagatccgggcgtgttcatttttaaattcacagacgcagagcctctccagtgctgccctgcagagcagtcagccacgctggtgctcgcttctggagctgcttctagaatgacagcggttcggcaggggagatcaattcctacaggaacgatcaaaggaaagataagaacttcggggctccgcggtcaggttccactcacagccagcttctcggaaaggagccctgagcggcgggagccacgcccctgcgcacgctgctgctcacgcgccccaccaggtggtagaacggggctactaccactttaaaataggtcaacttcaagccaaatgggaagacaaaaaaataagaagagccagtgagccccccaaaacgactccttcatgatccaggggtacagtcaaccaatcagccaatcaatgagaccaccttgagagagtctgcaaaatgcaaacgccttattccctgtcctgcgtgtgtgttcccagtgtgcacgtgagaccctgccttcagtgcagagggagaggggagggaatgggagaggggaacctatttcttttgtttcacttttaaaggagacaacactccagtattccgcagctcatttctcccttcaccccgatcccatgccccgtgtttggacgttcgctgagcctgctccgtgacgggtctgtaagttcctacatggggcgtcctctctatgagccccagggcacctggcccagcagttcacggtctgtacccactcagatatcattgtgggtctgacgaccggctccagatacagcagcttgacacaccagccccagcctcccgagggagcgcggccctgccttgatcctggactctggcctcctgagctgtgagagcataaatgctgctgttgaagccacacagttgtggtcatccgttctggtgaccacaggaaccgcatacggctctcttacaggtgagaccttccacgttacctgcagagcagccacctgggagtcacacctgagaaagagcagaagcaggggacaatctgtggcccaccaccaggagcccagggtggaggacccaggcagagctgggcatgctcagaggctgctgtccccatggcaccactcaaggagaaaaggggtctctggagagagaagaagggaaggggctctgcaagggaggcaggatccacttggcagctgctcaaatttagtttgcacctcctttgccagtgcagaagaaaacaaacgacctgcgaactgaatgaaaaatggtgattcattacccctgatgtgtgatgatggcttaattatttttctaactggggagagacgctttctgacagcaggtgcaaatgaattctccactgttttaaggagtgattggcccaggacaggcggaaaactgggaaacctaattaaattgggagccccatgaaataaatggagcggggagtttgtttgcttgtgctaacggggattaacgatcccctgagaagctgtagggctcccgctggagtgagcgcagggggccccgcggggcggacacagacaaagcaggagccacatggggtggtggggaccccactgcacaggaaagggtgggccagggcctggacgctgagctctacgactggctatcatctttggctctcggtctccttgtctgtgaaacaggaggctggacgatgggaggaccaggtgaaggctcagtgccaggtgatgggatgggatttcagagcacgggtttggagttggacagcccggggtcagagccagtgcaccctctgcctctgacccggatccagcttggatcctcagttttctcatctctactatgggggtgtgagcagtacctaccctcccggatgtcgtggggctgccccgaggttgcaggtcacattctcagcaggagcctgacccacaggacgtgcccggcaaagagaaggctcatcaggatcgccatcagatcatgctgaaggtcttcatctgctctgctgtgggaagggctgaccctcccaccaggcacactaacccctggaccttttctcatctcggaagggacacagtggccttgctgggagaggactgcagccagggggaaggaggaagacttggctccctccccctcgctggggccctgaacaggcctcccttggtgcttggggaggggcggtgaaaagcaagaccctccccaccaccctgtatgtcctcctgatggctgagagcctgctggtcgccctttagcttgccagactgtcctagaaggcccttggctggcaaggcccacacccctaccaggtggggccaggtcccggcagcagggctgcccctgaggtcagggatctgtgcaaattagagacgggcagctcccatggggggttcaggctcctgtggatgggcacctctgtcagggatatctgtcacctacaggtgggcaagcctgacttccagactccagagctcaggaataatccgtgaacacagccccaccatggacttccacccccgtcagccccacagctccacaggtccagcttccacagacccacaggtctagccactgagggctgtgctgtggtgggaacgtcccggacagcttcggtgggaaagtccctggtggctttcctggcttgggcagggcggggcttgttccctgtcccccagtacactgccccctcacccgccctccaggcatctgtgtcagggcaaacctgcccaggccccgtcctctcaggttcccccagcacaagctcccagatgttctttttctttttttttttttttttttgagatggagtcttgctctgtcacccaggagtacagtggcgcgatctcggctcactgcaagctccacctcccgggttcacaccattctcctgcttcagcctcctgagtagctgggactacaggcgcccgccaccacgcctggctaagttttgtatttttagtagagacggggtttcaccatgttaaccaggatggtcttgatctcctgacctcgtgatgcacccatcttggcctcccaaagtgctgggattacaggcgtgaaccaccacacccggcccaggatgttcattttctatggtcctctcttctcactccttccctgccaagggtgatgccagtgtcccgtccccactctcagttgaacacacagatttgggggagcctgagggggagagaacaagctggcgggaagccgcaggactgaggcccgtgaggacagtgggcgtgggcagggccacagcggtgggagccctccatgtcccagcccaccaggggcctggctaggcactggttcctccctcctaagccaactctttgaggtgagcagtctacactccgggcatgagggatgcaaggagttgggaccagagcacgtgtcaaggagtcccagcccgcgggcaccccaggccacacggccccactctgctgcaaagccctctgtgcccaggtcacgcagctggcccaaagatggcaggagacacagatggacgcagagggccagcctgtgagaagccaagaagcactgggggtccagtctcagccccggcgccctctcctctgcccacatccaggccaccagctccacggactctcctgtccctcccctcccattacctagcttctggccctcctcaccacccctgtgggtccctcaaatcactcactgggcccagtcctgctctcacagcctccctcccccaagaaccatccatggctccctgtggcctggtatgctcagacctcagctgcctgggccattcacctgtccatctccagagtccagctgccttcctaccccacaccaagttttaggcaattaactctttcctctatatgtgtttgacctcccagctagtctgtaaaatcctagaagaccagaatcatggatgttcaaagaagtagatagcctcagtcccctcctcaggacctgacacctagtctagactccaggaaatcaaaggcctgcatcggatcgtcccacccacggcaggatgctgggactcccagactatgagggcctcccaagcaatcaccacagtgaagcatgttccccaggtctctccaaaaatagccctttacgtattcatcttacagctgattttcccccaacattttatcaccaatatattcgaacatatggaaaagctgaggagtttgacggtgacggctgcaccccaccagctcgatgcaactggggcattctcctccacactggggcattctcctccacacgctgcatcacacatctgagcccatctccaccctccgccgcccgacaacctagtttattatttttgatgcatttgaaagtaagctgcagacgtgtgtgcacttcccccgatacttcagcgagtttatcatcaactagggtttgacatttgtttacattttttttttcttttgaggtaaaaattgacatacaatgaaatgcatgagtctgggccaggcatggtggctttatcctgcactttgggtagatcacttgaggccaggagttcaagaccagcctgggcaacatggcgaaaccctgtctgtactaaaaacacaaaaattagctgggtgtggtggcacgcccctgtaatcctagctacttgggaggctgaggcaggagaatcgcttgaacccaagaggcagaggttgcagtgagctgagatcataccgctgctctccagcctgggtgacagagtgagactctatctcaaaaacaaaaacaagaaagagaaaaagaaacgcatgaatctgcaaatgcacacagctgcacaactcttcacctgccaagatgcagaccatgcccctcaggaagtcccctcatgcccctccccagccattcccacctccagcccccagggcaaccactgtcttcactgttttccaccacctctgagttttccctgtcctagaactttctgtgcatggatcttgggactgcacgccttcactgctggctcctttcatgctacatcagggttttgaggcccattcacctccctgcatgtattggccccttgccccttttcatggctgtgtaatattcctaatgccccagggtttatttatccatctctctgctgatgaatgtttgggctgtttccatttctgggctcttgtgaacagagctgttgggaacatgcctgtctgtgttgttcagctacagcttattttgagagattattttctcattctttatgttgctttagaagatggaaaccaggcagagacaagcaaactctctttttgctcgttctcccagctgccgacaaccctagggatggggtcggctcagcactgcttcagccccaaaattctcacccgtggctcccgctgggggatcttgactctgccaggtcgcttctcagtctccacgtctcaggactggttgggtctcagagctcttcctgcaacaccctccactccgtgtccaggcaggacagccacctgcttctccctgggctggcgaggatgaggcctctccattgcctggctgttgtttctcccgccaggaaatccctgactcacttctaattgccgggaattgtggagagggaggcgtgtcccatcaggatggggacaattaacaaacggtgccctccatttcctttcacgcctgtaaatgtgacgcggcgctgagtgtcattatctccccatgtcctaccttcccaacatgaccacgtcgcatggaattggctccagcagttgataaaatttgcttcataaaattctggggctactacatgtgtttgtttaactggcttgcccccgccatgggaaagggtgactccctacaatgctggatgcttactgagcagccaggacctggggggacaatatttgggggatgcaaagaaatacccgaagctggctccagactcctctatgcagctgaagtggatctgcacggacttccatgccaggctgctggggagctatggtggagagagaggtgagctgcagatccaccggtgcttaccaacgtccgtgcatgcttgtgtgtttttgtttctgttttgagatgaagtttcgctcttgtcgcccaggctggagtgccatggcaatcttggctcactgcaacctctgcctcctgggttcaagcaactctcctacctcagcctcccaagtagctgggactacaggcacccgccgccatgcccggcaattttttgtatttttagtagagacggggttttgccatgttggccaggctggtctcaaactcctgacctcaggtgatccacctgcctcggcctcccaaagtgccgggattacaggcgtgagccaccttgcctgccctgtttgcatgtttttagtaaaagtaacaatagaaatctcacaaatgaacaaataaatcactcaactattgaataaaggtctgggagtatctgtcctattgttaaaagaggcttcccctgggggaggacaggaaggagtggggcttttcactttgtatgtgatgtgtttccgcatcttcattgaagtgctgtgagcttgtcctgccttctttcaaggtagtatgtaatttggctggagagcaagacgggaacatgcagtaactcacaatgtgagacaataaatgaggctccgcatttggcttccattcaaaccagaaggagcgagttgtctggaggacagagggtccctcaggattgggggacaaggcgtggggaggacttctgcaggattgcaaaggaggaaggagagctaggcggccgggagcaggaattcattcaaggtggcttgggggaaggtgggagtaacaccgaggcaagaatgcaaggcgccctctgagagggcttgtgaaaaacccctgttctcagagtcctctttgctaagactagaaacaacagagaatcgttcttttactcctttgcactatataaagacctactatgcagccagcactggcctggagtcggaatgcaaagatgaaacgccggcttctcctccaaggagctgtgtcgagcacggaacccaggtcccagctagtttgtttccagcgtgggctctggagcccgccagccccacttccgatcctgccctgacgcttgccagctgtgagaccccaggaagctgcttctgatctccagagttctgtttgctggtctgtgaagtggggggagaaggagcactcgcctcctggggtcactgtggggaggcaggctgcgtatctagcagaacacccggcccagacacacactcgatggctgggtctgcaggggctcttactaaatgatctctctcatcacagtgagaagtgccccaccgaggacagcttcttcacccaagcgagaccagtgggagggtcgggcagcccccacgcagcactgagctatgaggtcaaagatgaggaggtgagtccacggggcagaatcagccgaagaacttaagcagaaaaggctggagcaaccagcgggcaatgagatctgagcaggatgggggcccagggctctgtggctcacggccatcccaggagcctggccaagtcattctgtggttttaaagacagcgacctccgaacctgcgggttccccatctgctgctcagggctcccccaaccacagatctagacatggttgctaagggggtgctggatggaaggcaggtccctaggagaccctgttctgagaagcagagtcttaaaatgcatttagccgatgaggcccacattgtttggctgagttaatgccaaattgcatctgaataataataataaccagaattataacgccaggtaaagctgagctgataacatcatcaccatcattgttcttgcattaatggtctctctcaccaagtaattattgtagtattattattcatcgaggtgaaattcacattacaccaaattaaccattttaaagtgtatcatttagtatcatttaatctgtgatgcaaccactgtctctatcaacttcaaaaacattccatcacgccaacagaaagccctctacctggttaagcagcctctgcccatcaccagcccctgccacctggccctcagccctcagcgaccaccaatctcctttctgactctatggatttacctaccctgggtatttcatataaatggaatcatacaatatgtggctagacacaaaaggccaccccttctgctgagcacactgttttcagggtttgtccacgtggcagtctgtatcggaactgaatttctttccatggctctgtggcactcccttgcgtggccctaccacgttttgtgtgtccattctccagctgacaggcatttggcttgtttccgcctttgggctcttgcaaacggtgctcctacaaacgtgtgcacacatggatttctttgagcccccactgcagtctttttggagtgtgtgtctaggagcgagacggccgggttgtgtgatagttccatgtccaactttttgaggaactgccaccctgttttccagtggctgaactattttacatccaacaatgcacaagggttccaatgtttccacatcctcaccaacacctgctattttctggtttattttccttctgtggcctatgaagtggctgcctattacttgtgtagatatatggccttctgaagtccataaggcatgtgcagagggtggtggcatgttgcctctgtccatatggaaactgataagcaagaagtgaagtgcagggccctgtgtctaaccccagagcaggtgggcctgagacctggagctggcaggcagctggggtccccgtattcccacagagcgggcaggcaggtccctggagaccagtgccatggggtcaggctgggggatgggcactggtgagaggcggcagggggccagctctagggatgctgtctggcctctgagagacacccccccatccacccatttcttatcccagcacctctggcccctgttgatggggtcaagtggcctcagcctagaaggtgcagattggagggaggaatggaagtctcctggcatcttgggtggtatttggaatgcagacaatgcgaatggaaggatgtgttgtgatttcttttaggacaacaggtcctctccttatttcccgcctgctcctctccactgccactctccacccttcagctctgcacacctggacagtgaacagctgttcccgtgcctgctgcctcagctcagcatgcgtgtgcaatgctagacggccccctgcacacagtgtcctggccgcctggctgccttgggccaagggagtgtctcttgtggacggtcagtttcctctgggacataggttctcccctgcacagtcttagctgctcccagtcagtggcatctaccctgctgcgtttcaggctggttctcgtctccgtgcatcattctggctgcggcaggcagagttccaggtcagcacctggtgtacacacatctccaagttcttcagccaaacacaaaccgaggtgcagctgtgaggggattttgcggcaggggggcggtcattaaggacccaggtagggagtttatcaggtgggcctgacctaagcagatgagcctttgaaacacagagagttttctccagctggtcgcagaacaggaagccaggggattccacagtaaaagggatggggcaaaggggaacttctccactggtggcgtgaaagtggaggggtcccgtggtgaggaatgtgcatctgagcttctgactgacagaaaagtggccttcagaaaaatggtgttgcttaagcccctgagctggaggtgttttgttactcatcagtggcacatgcacgcccaggtcaggcggtgcctcctgcctcctgcttcctgagctctgcaatccctcctgcctcagttgctttgcaggctgctccgcttgactgccggccccaggaaggcaaggccccgccataccagctgctcacctgtggcaccagcaggtgcttgctcactgtaggctggggaacgagctggcacctgctcacacccctcccactctctgcaccacacggctgggctgggcatctggagacctgggctgagtgcagagaccccgctttctacttgtgcgatctctgccagctaccttgccattttgtgcctcagtttcctcctctgtaaaataaaaacagcaacaggaaccaccttgagcacatttttttcgtgccccggcaccaggcgctgtgccgacggagccgatgctgtcacgtaaccggatcaaatgttcccaggactttctgtgtgctgcttgcctgcgccctgctttctgggtgtgtgttccagcttctgaactatatcgaagggtcccaaaggcattttggggtgggggcacctcatggcacctcactgatctgctcacaccaaatgcaaaaaccaaaacccactgagactcattctggaattacctgcagttaccccaagcagccaggttgtctcggacccagggcctctgcacgcaccgtccctctgtgtggagcattcttccctggggagcgtgttcagccttggcctcagctccacgggctcctcctccacccttctcccacctcccctccaggtctccatcagttccctccttggggctgccctggccccaggcttccccttccatgccctccctctgtgctgtaagcccctgcctgccagcccgacttcggtccccacgcccccacctgcacagtggtgaggcaggaccagagcctcattcccttgtatgtccccagtctcccatggtgcctgacttgtagcagttgttcatgctgtgatccatgcatgcaatggttgttctagagcacccgtgttggacaagccaggccccagtcctcgtggagccctgggctagcactcaggggacgtttgctgaatgaatgaacaatgaaggctcatactggggccaattaaatggaaaatatggaacaatgtgtgtgcagcgtgtatgcacgtgttgtgtatatgtatgtgtggtgtatgcgagtgtgtagtatgtgtgcgtgtatgcacgtgtgtatatatgcctgtgggcatgatgtgtgttatataaatgtgtgtgcagcatgtatgcacatgttgtgtatatgtgtgtgtggtgtatgtgagtgtgtggtatgtgtgcgtgtagacgcatgcgtgtatatacgtatgtggggtggtgtgtgtatataaatgtgtgtggtgtatatgcacgtgttgtgcatgatctgtgtgtggtgtaagtgtgtatgcacatatgtgtatatgtgtgagggcatagtgtgtatgtgtgtcatgtatgcatgtgttgtgtgtgatatgtgtgagtgtatggtgtgtgtatggtatgtgtgcgtgtatgaacatgtgtgtatgtatgtgggcatgtgtatataaatgtgtgtggtgtgtatgcacatgttgtgatatgtgtggtgtgtatgcacatgtgtgtatgtgtgaaggcatggtggtatgggtgtgagtgaatgtgtgtgaggtgtatacatgtgtgtgatatgtgtgagcgtattgtgtatgtgtgtgcacatatgcacatatgtatacatgtatgagggtatggtgtgtatgaatgcattgtgttgtgtatgcatgtgttgtatgtgatatgtgtgtgctgtgtggtatgtgtgtgtatgcacgtgtgtatatatgtgtgaaggcatggtgttatgtgtgtgtgaatgtgtgcatgtatgcatgtgttgtgtgtgatatgtgtgagtgtatggtatatgtgtatatgtgtgtatgcacatatgtgtatgtgtgagggcatggtgcatatgtataaatgtgtgtggtgtgtatccacgtgttgtgatgtctgtgtggtgtatgtgtgtggtgtatgtgtgtgtgcctctatgcatgtgtgtgtatatatgtgagggcatggtgcgtgtgtgtatgaatgtatgtgtggtgtgtatgcacgtgttgtgtatgtgtgtggcatgatccccacccacagtaaaggggtgactaccactctctgaccctgagcccctctctgttcaaccctccagcctcccttctgctctctgacagccagaggaaccagcctgcttctgccctgtctccgtccatctctcctaagaaggaaaattgggcattttcccaaaaggttctgctggtttaaaagcagggagggggaaagggggaactgcctgcaaatgtcacttgcagatgaaatttctgaaatgcaagagagaccaaaacagaaacctcaaatcagcccagacccagcctcaagagggcaggccggggcacccctcccctgcagtgcccatttctgtgccagccaagaaactgctctggttacaaaggctgcactttctcaatttccgtgacttagactccaaattatcccaaaggcaggatgtggagtctctgagtggaagaatgaccattcacctggctctccttccagaacctgctgcatccagaggctttctgaatttccatggatgtggggaggagccacaacacaaaagtgacacctgggctactggggccccccacaaacagcagggaatccctggagccacagcatccccgctcccacccaggaggctcaggccgtgagctcttctcttcccgtggccacacttcatcagggagcaggtttccacctggagcgtggagactctgaagccagtgggaaggaggctctgggcacaggcagcgttgcagccccagtgagagatccttctgcaggtgcacacctgggcgatgggcagaggggagggggctggaaggcagcccgaggagcagcaggccgcgagcccacagggtccaggaagagctcgcacctgggcacccagcccgggccatccttctgcggcctggccagcagccatgtgcactggctgccacagggcaggcggctgccatcccatctgcacctcagctggggcctgggttctgtgccaagtggtccctaccagcctcatacaggcgggtagtggtgccctaggcaggtggcgtgggctctgggggtaggagagggggcatgtagggggctgtgaagctgtgtctcaggggcagcaggggcaggacaggaccaggcagaggggacccagctgggtttgggcagctggaaggaaactccccaccagctcggctggcctcggccttgttattctacccaggatccacaaagcccccagaagaggctcaggcaggttctcaagggccctcctggagtccccttcagggccacactcctgtccatatcagggacttgcggcagcattttctaatacaatgcaaatcaacaattgccttgctgaagaacaaggggtaaaaaaaatcactgtaaacaaagtctccgttgccatggagactattaaaaatagattggccaccctacccccttccttctgggtaatgtacagcgagttccttcacaccacattattattactttttaattatgaataatttcctcctttccataggaagatggattaacacacacaacttccccacaaagcccctcagcgtgtatttccatatgcaaatgcggcgggacggtgccccgtgtgtccaggccccagggcgaaagctccccgtgaatcccttccacctctcctggtctccctgcactctcagcttcctaagcctgtgtctgactgtccgtctggctgtctgttcgcctgcctgcctgctccaggctgcggactcagaaacagtaaagacaggtctgggaggtccggcctggcagagctaaggaactgctgtgtggggtaagcagcagacccccaagaggatgggcacctgggaagacagcgtgcccacgggaggactgaacagcctctgcactcccgctggcgcgaacaggctctggtgaaaagatgggctttgtagctccttgctgacatctttccattcagtcgggaggaaccatgcagcaaccccctggcagtgggtctgggacagagcccgaggtggcgggagccagggcagcgggaggggccgtcgcagtccagctcccgttcccagagggctcctgagcctctgaggtccccagctgccaaagcacaggtctgttccccagggcagcctccccagctcatcgccacggtccacatgcggacaaagactcacaccaatcccagggccaccaggctgcaatttcatcacggggttctgagtctggggagttcaagtgacttctgagaccacttgggggtgcaatctgcccggtgccacctacgaggaccgcctttgccgaggtacctgggccgaggcccagcaatacctggtagaatctttgtattcgtttaagcccagatgagttccaaagagccagtccctggcacacagactctcacctttaggaggctgcccatggctggaccctgagtgatccccacatgaagtgtggggctaaatactccaaggtccattttttgatcctgggggtcagagtacctcccctcccccacccagggagaagggggcactgtgcacccctgaggccgaccctagcggctgtggaagagctaaggaaacttggaagccctggacatctcggctcttgtatttcagcacggcagacgcagatggaggagagagaaactccctcctctggtggtgtgtgcatgcaggcagccccaagctttccaaagccactctgccggctcctggggccaccagggcgggcagctagatggccaagtggcaggacagtcacacaattgcatgcggctcagttacgatgggcacacagggagcaggtcctcggagggaggggctggggcggagtcggctccctgcctgacgtttaggtgaaactcttctttcatctgggccctgggggaggcagagtctgtgtgggtcataaggaggggtctctgcaaatggcagcctgcatgtgctggggctgtggaggaagggagagggactgcaggggtctctgagcatgccgcagaccccaggggagcccacacactggagcaggcccctcccacctcctcacctgcagacgcccccagactctgagagtctctgctcccctctccactgacatgggccccagaattccaggaggaggctggaaaaggccatgcctgcgctgcctccttctgccgccgcctcttcctctcgcctgcactccagggtccatgtggtgcaacggagtccttccagcacccccaggcagggcagggctgcccacaggtgcccccacaaggccaagggctgccacctgcacggacaggtctcagctcacctgggagggccaaaggacagctggaatcctccccgggagcagctggaatcacctgcaaccctcggtcaaggagtggacctgggagcagttactgcacccagagctccctccctcttctggtctgaggtgctttggccatggcccctgccaaaccagcccttcctgctctgcccaccgccaagcccaaagcctcctccctagcagacccgccagctctcctgctaggcatagtatagggcaaggatagcaccacagtccccattctcactgtcagcccccactatccatcaaggacgcccaatggttccaggatccaagacagcgacgtggcccagcacttctggtgtggcccctgcgatggcgtgaccagagagagcgaagacacttgctctcccacgggggccagcaggtgaaccctggggccaatcccagtagcctcctgtggggagagaagctgcaggagaagtggaggccggccctcccccgcacccacccctccaggttgggatggggctgccactcaggcttcagcagccccttggatctatctgcctcgattgctgaccccttggtactgacaagcgcagctggctgttttgtgacctttagaatctaaagcaacacaaatagagcagcccccttgccatgaaagtctgcagggcaaactgtgggcccaggggatgtgctgttttggggatgcggctctccctcctgctggctgcacctggctggcaggttgggcaggacccatgttccttacccgcatccgaggaataccacagttgcctggtaagccccaggccccttggcatggtttgcagcagggttcgcatggcagggagtggaaaggcggccccaccctgtccctgccgctctccccagctctgcataaggggcacatctctcctggcagggtggaaggggcagccaggtgttctgccaggatggcaggaaaggggagaagtggctgtgactgtgcctatgtcatctgcacagcctgggggagaggagagaagataacagaggcagagaagcttctccttgctccccgtaagagtctctcagcccctcagcctctcccaaaacccctggtcagaggcagaatactcactcctgctcaggggtgcctcagctgaagctctcaggaaagaaggggcctggctctgcagttcttgaggacatcagagaggacacccctggccctgtcacaatcccttccagagagcaccagcggcctggcttgtccctggatgttgaaaagtagctgttccccacggcctttctttctcagaggaacatgcccaaccaggcagggaagagtcctgactacaagccaatgggctgcccgacacccataaggatggctgctatcaaaagcacagaaaataacaaggcattggcgagggtgtggggaagttgcaaccctcatgcattgctggtgggaatggaagatggcgccgctgctgcggaaaaggaaggtttggcggttccttaaacaatcagatggaattgccatatggtcagcaaccctgctcctgggtacagccccaagagaactgagagccgcaactccaactgagaagtgcacttcgtgttcacggcagcatcactctcaatagccacacggggcggcagcccagtgtccacggatggacgaatggagaaacagaacatgctccatgcatagagggaatatgaccagccttacaatgggaggaaattctgacacacacaacatgggagaaccctggggacatgacgctgagtgaagtaagctggtcacaacaggacaaatcctgtgtgagtccactcatgtgaggtccttagagtcatcagattcagagacagaaaggagaatggagatgccaggggctggggagataggaagggggcttcgtgtttcctggggacagagcttcaggttagaaagatgagaacattctggagatggatggtgatggccgcacaacaagatgaatgtacttaatgccactgaacagtgcacttaaaaatggttaagatggtacattttatgttatgcatattttaccacaacgacaaaaagttttttccaatcgcagggatgtatgtgttccatccagctgcctagtcctccctccttgcacacccacccatgcacacgcgtgcacacacgtttcccacactaaaagttggccacgttcttcctacagcaaaagaaaggtacctgcccccaattttccctccactagataatctccttgaacaatttcataaagaaggattcacaccgtgccacgcgagaaagccgtgtgtgtcagccaagagcctgcggcctctggccaagagcaagaagaaaggcacagacatagatgcccagacatgtgaaggtggtcagtcgtggggccaagtctcagggcagcatcccagctcagggatgcttcttggcaaggaggtctgggagaaaatcaggaagtggcagactaagaccaagacagagagggatggatgtggctgtgccaagtgccctggcatcccccaagtctgggtggcaaatccactctccttagacttgctgcttgagaaggaggtttgggagaggaattccttcccaaaaagtgagggaggacatggcacggaagacccagccccttcccatgcagcctggtaccaggcagtaggtttgaggagatggcacccttgtctgtgctagctcagactgggtcaccacccagctacaaatgtatccttatttaatctatagcaattatattcacattctgctagacaaatagattttacaagccctcagttaaatgtggataattacgtctgctggtgtcaagggaccgtatcgtccaagctcaggaggaagcgtggcatcctgagtcctcctaatgctgtaaattagcaggcaacattcccatggcagctaagcaattatccatgatttcatttttccccacgccccctcctcacctctgtgggctgcccggccatgcctgtgcacacatgtgtgtatggatgtttcaggcatacgtggctgggaatggctcatctgtctctcgagttgctaagatgccttttccccgtgagaggcctctccccatgttggggtgccacccactgctctgtgctctcctgtgccaacctttctcctgaaaatgtccatcatcagaggtgtttccagaaaaccaaagatgagccaacgcctcaccactgccaagacctacgtcttggcagggttcttgcagatgcaggaggtcaaacaggagcttcggaagtgcatagcaggcaacgaggaccacccagtgctcacaatggttgcctgtgtgcatgtacacacacgtgtgcacaaaattcagaggcgctcaggcgctccgaggttcacaaacgcctgcagctctgccacttttacacagggcaatcttggagaagccccttcatctccagacctcagcacgttcacctctaaacgggagaagtgatacccacctcccacctgcagtccccctcacaatgtggttgtgagatcatacgcaatgaaaaataggaaagcattttgaaacacacaaagcaccaatgaaatcaaaggcagggctgcttgtgtgagttctgggcgccctggtgtcttggcatcctctccaagagcagacttatgaatgctgtaagatggttaacaggggccgggcgcggtggctcatgcctgtaatcccagcactttgggaggccgaggcaggcagactgcctcagctcagaagtttgagaccagcttgggcaacacggtgaaacctcgtctctactaaaatacaaaaaattagccaggcatggcggcgtgttcctgtaatcccagctactcaggaggctgaggcaggagaatcgcttgaacctgggaggcggatgttgcagtgagctgagatcatgccactgcactctagcctgggcaacagagcaagactccgtctcatacacacacacacacacacacacacacacacacacacacacacacacaaaagatggttaacaggtgtgcctccttttaggcaaatctgatgtttaaaaaacacaaattggctggtgagtcactttacaaaaggtccctttaacgtggaaatggaaagtttctgagtgcatttcaaatctactgccatttttaaaaatacttgtttatctacaagtttctcagaacatatgtgcagcaccaagtcagggactcccaattagaacgcccccacccacgaagggagcatgggaggaaagtgtgagtcagcggccccagggctgctgggcggagtcctctgccagccagcctgctagagtcccctgggaccttctccctccacagccatgtccaggctctgtccagcacctaggtctgcccccatcccaacccaggagaaggggtccacattctcacaggggtctccatggcaccactgttagcaggcagggcaggcctaggggagggaagtgcacgggaaccgcttgcctcccagccactgctctgcagctgaagagctcggccacccgaggggagggtggaggaaagaggccttgctgtgaggaatctcacccctgccacaggagggtcaggcctctgccctcagcttctaggacaggatgtctaagcccctggaacggcttactgatgagtgtctttatttactcagggtcttcgtctagccaggaagtaacaatgtgatgtgggggctggtctggggtctcacgggatcagctgacctctagaaagcctggagactcaggtcagccatgtacacctcccaagccgccatgatgaagctggtgaagactcgggcatggaggcccaggggcttccctgctgagtgagcctcccctggtgggttgaggggcttccctactgggtgagcctccccaggtgggtcgagggccttccctgctgggtgagcctccccaggtgctgtcaaacatcagtgccaggaagatgacaccgtcctggcttcacagcagagggcaggatgctccgtgccctaacctacaggcctccatgccctaacctccgcggccgcttctctcagctggttccaccctgtgtcttttagctgtaatgaaccctgagcgtgagaaccatgactgctgggctccgaggtcctctagcaaacaaccgggcctgagagtggttctggaagcctctacgcttgaggctggtgtcagaagtggggctgcttgaagtggatggccccctcaatgtggaaggaggctgggcctggctgcctgccaagcctaggggcctctccagagcccacggaccacagccactggcaggacagcagctctcagcccctccccctgaagaaagcatgtggggagggacagggcccagggcctcacctggacaggaggcgaggctcaaatgacccatgctggcattgggtgacaggagggggccccagaagttgaggacacaaggaacatggacccctgaccagggcatgcgggaccccaggggcacaccgaacgcggtcaccataggaccaaacaagatgaccataggaccaagcaagatgacgcaggcccctggcaagcctgaggccggggcagcagccatgctctctcctcctgtggtggggaggtctccttgaggccttgggacaagggcagagagagagaaggggaaggaagtgatcaggtgccggaaggccccgtgagggtggcccacgaggctcatgggttccaggaacccacgccccaccccaagctgcccggtcctcagcaactggccccatgttccacaggctcagcagctcccaacagaattctaggtgctgcccggacgagatgaggagggggacttgccggctgctggcttccagcctcatggggtacagaggcacccagggaggggcagagaggggagaagagcattgaaggggctgagagaggcgggacttggagcctggggagaagggtgtgggccggggaggagaggagaggtcctgagaaggccctctgatgatagctgctctggagaggcagaagggagacagggaaacagggggagccatgtgcagacagcagttgggacgggcacgcggggagggctggcccccgacagcggcagcacagcctcgtcttcctggtaaatcatcctatggcctcgctggcaactgtgaccaagatgcccaacccccctccccacacattcaacccctccctccgtcctgtgctgccacagcacccccactgcctccctgtgcccggccctccactcccaggccggtgcctccaggaagcccagggggtcacctgcccgagccggctgctgccctctgtgtttcacccagggcttcccggcccaggctgcctcctctgtcctcccgctccctacacaccccttcatttgcggaagccgccaggcagacactcggtctgggcaaggcccagggtccagcagcctcaggctgggcggggccaggctgggcagatgctgggtcgtcaccccggcagtgctcctctctgcctgggcgcagtggcgggaacccggggtgcaccctggctcttctccatcaccacctgttagggtctaaattgtgccccctccccaacttcatatgttgcagccctgacccccctgtgtagctgcatttggaggtggagcctataagtaggttattaaggttcagtgaagtcacagggaccctcatcggatgggattgatgcccttacaggaagagacagcagggcgatatgcactctctcttcctctccctgtctccctctctgtgtttctgtctgtctctctccaggggtgcacagaaaaggccacgtgaggtcgcagggagaaggcggcatctacaccagaaagagtcctcacaggcacgggacaggccggcccctgcgacgggacttcgggtgccccgtgtgccacgaactcccctctttctgcctccagccccagtctccttccagactccagactcttgggtccagtggccaactagtcacccccaccagagttttcaaacgtgtcttggcgtcacatgtccaaaaccaaactcctcacgtcctgcggtctccccgtggaagccccatctttccaggttcccaggtacaagttcgtggcattgtcctggattccttgaccgtcctcgccacgcccccatcgaccaggatgccaggagccaggatgattctgctttcaatgcttgtgcagatcctgccgcacagaccccaaccctacctccagtgtggtccggcgccaccacctctgccggacgtttgctatctctctacctccgtgcccagcccccggctattctcagcacagcagccaaagagattcctttaaaatagaagtcacatcctgccagcgctgccggtacccagcacctggggttctccgctatctcccacacatcgttctcaaacgccgccacctctccacgctggacactgccccctgtgcaaacgcagcccccaccccttcgtcccatttgctttttcccaggaatgcctgcccccccgaccaccccgtgcccacagacaaggtcagctcaatacatacttgttcaaggaacggacaaggaacaagcccagtggagtcgctgctgggcagggctgcccatcagcaaatccccttgcaacttctccatcgtccacgaggctcttggtgaccccatcccggatgcccagtccaggcgcacactcagtcatgtgctacccagagcacgccacatgccctcagctccctgaggcctttgcagccactatgccctctacacggaatggctccctcttgtcctctcttggcaagggccagccagcctgcagccctagcccaggcaccccttcatccaaggagacctccctgcccctcagtccgagtcaggagccccttctgtgggcgccctctaggcaccctcactcaccccataccagggtgctgcacagccttcagccctccctgtctcctgctcacagcagaagctccctgcagccaggggcgggtcttattcacccctctccccaagtgcagagcggaatcctccaggcaagtacatcatgtgaggaatgaacacacagtaggggctctcccagcacaggtggcgtgggaatcatagcctgtccgggcctcccgcccgtcccaggagcacaggggtgagcgtctctccctcggcactgaccaggggatggacaaggaagtccacagccaggaagcccctgcccccagaagtgaagctggggcttggcaggaaagaacagccagccaggctggcggagcctgccctaaggtccctccgctccccccgcaactgagctctcgactctcagcagccatgggccctgccacctgccagccatgctcttcctgtgaaattctctccagctggagtcaccactggcctggggcttcttcctgtctccagggtggtgcccactgagtctccttgactaggaccaccccctcccccaccaggcttccaagggctcggtccagccctggctctcctctcccctctggcctcaggcaggtctgtggctcaggaggacctgctgacaacagccatagtcttccccctcgggccgggccggagctccagctgccacctcatgtccttcctggggtcatcccttgggatcctcaaacctggcctgcctggacggatgctggtgtcccctgactcgccccatctctgctcctggaaggcagcccctacccatttagtcaccaaagcccctccccaccatggtcaactgtctgcaagttcccagagggagacacatttccctgtggcctctgctgtgctctgacaccctgggccagccccaccctgtcgcccgatggcttgctgtttaacatgtatcaggtgacactcacgccctgctaacccctccacaagcctcctggttttagaaaataaaatctgtgctccttacccaaggcctgttatgccccaccctcctctctcacctcctcttgctacactaaaccctccaggagcatgggtttctgtcagcttctagaacatacccagatccttctgcccaggccaccgcaccctgcaaaccccccttcctggagcaccctcgtccagacctaactccttcctggctggttctcatccctgaggcctcagctccctctgagtgccctgagcaagtcccctccgcagtaaccctctgcagtggggagggcctgggggggcttgtgtggccccagtgctcactgggaacccacagtgtgtagccaagcagggagtcaaccccctggggccccaactgcctgcactccccagaggaaggaggcacctcccacccggactggagccgtgtccacagctgccaaggatggtgccctaaaagattctcacttccttcagaggggcaaagcctgagatatctgggagacccaacaggacacagcagaggccatgggggtaaataaagagggagtttccaaggtagaccctgctgagctgtgcacttgggatcaaccttggggcggcactcacagccaagagatggacagagcaaggaagggggagaagacaggagggccacgaattccgacttagaaggcggcaagagcagagggagcagtgaagggacagagcgggagattgggggcccgggggttccgaaagacactggacagttgcagtggagatggggagggcaggaggagaggatggggggaggagaggacaaggaatggtgagggcagagacccccttccagggatcttgctgcaaagaggggcgggcaccaggcctgcgcctgggaaggtggtgcgaggcgagggctctctctgcaatgggaagacagacgcggtgaccagtgtaacactggaggaatcacggagagtgtggagggggagagagcaaggctgcgggactcatggcctggagctggggaggagagggagacacagcccacaagcagaaccaggggcttttggcaagagtgagtcagggggcatgggtgctggtggcctgggtttgaggagagagaggagcagaagagctggctggggtgtgaggactttcaggttccccaggtcgtggggcccacctttccggcagcatcccagtcctttgtcccacttgtcccatgcaggcaaggcccagaggggaggcagacagtcgaggatggctgtcgcaggtgctgggagaggaggtgttctcgtgaatgcgccatgtctttcttgctcgaacagtaaataaaacctcagggtcaggggaacaacccacattctaaactggcatccctgagaggtgacaacaatgaagagacaacggcaggcaggccgggagcactcgcgacacagtgttctgtggttccaacaagactttccttccagccgatggggcaggcacctatcatcctcgttttaccggtgagggaactggagtccaaaagtgaactgatgaagcctcggtgtgaaccccagaacttccctagcccacagcttgacttacttgtccacaccccacctcatttccaaattttggaggggacagcacggctctatttactttggggtgtgtgttttttgtttgtttgtttgtttttttgctttgagacagaatttcactcttgttgcccaggctggagtgcagtggtgtgatcttagctcactggaacctacacctcccaggttcaagggattctcctgcctcagcctcccaagtagctgggattacaggcatgcaccaccatgcccgggtaattttgtatttttagtagagatggggtttcatcatgttggtcaggctggtctcgaactcctgacctcaggtgatccacccgcctcggcctcccaaattgctaggattacaggtgtgagccaccacacccagccccggagtcccttttcttagtttatttatctgcagaagcagggacctggctctgatgacctgcagaccctcagttcccgccaatcccgaagctctctacatcctcagttctccaggtatggtgctcggagcagtagctgtgcctcccctttagctggtaagagatgcggacggggggcccctgcccagacaggcccactcagaatctggatcccaatctgtccggggaagcagtgcggccagggaggctccattccacatcacccagcaccacctcagggaccctgctctagggaatggaggggctgaggctctaaggtcctgggagatgtcctttgaccctgttggtagaaaggtccctacacagttgggctggcgggaagcacccctgtctctgaggggcgactgcagggggccttcccgggctgtgcctgctccttgcaacactgatcctacaagatttcccacaaaccaggggagctgtgaggccgaatacgcttgggagctcagccagtgattttgccttgtggatgctcctgatgaacactgtcccattgaaggcaccaagaaagtatgggcagagcccactgcacttccttaacagcatttctcactcttaaccgtggagacccttgttaggacacagctaaggcccccgaagaaggatcctgttggggaaacatcctgagataggaagcacaatgagcagagaaggcagaggctcctcatagcacatccattcacaccatctgacaaaccccacctgcacacgcacagatgcgcacacacatatttgcaacatgcacaggcgtgcacacatgaacatacatgtacacatgcacatatgcacacatgaacacgtgtacacacgtccctgaggatgctttgtctcccagccacttcttttccaaagcagctgttgactgggccccgtgctcccagcagatggagctgggcctgctggttacggctggcacttcacctgacgtggccaccacaaaaccacggcatccccacactccctcctcctgtataactgaatgtccaggtcaacccctacactcagccttaagaaatgggcccacaaggcagccactgtgccgagacagactccgcctgcagcaatatcctcgctgtcctcgttccctctctctctgtcccttgaaggtgcctggtgcactgtaggtggctcctgggtgtggcaccagcacaaaccctcccatctccacagtcacagcctgaaggcacagtttccccggagcccctgcagtgaggggaggtgagggagggcaggtgccatgggggagctcgcggggcaggacggtctcctgcagacccaccctggtctgggagccactctccacctgcgtctgcccccgcccagccttcgcatccaggaacaagtccagggacacggtatcagggcagagccagctccactgatggggcctagagccctcttaggctggtctcaactttttacttgtccctaacacggggctgctgtcccctgaacatcaccacagccatgccaacccacaggtgacccacgggccttcctgctttcctctggttccctgagctgcacccacaaaaagcctccgacagcctcgggaggcagagatacggactgctctgatttcacagacgcccacgtccacacccctgctgatagaagccatggtggcagtgcctgtgacgctcacgtccccagcaggacgtggcctgtgacctccccagctcaggactgagggtaggtgacactccctgccccccggcttatgttctcagaactagcagtgaattactgatgggtaaccatcggtctaatttctgtctgtatgaatttaactgttctagggaccttgtataagtaaagtcatatagtatttgcacagtatattggagcttgcccttgctccatggacagagttcccggagtggctgactccctctttactccgggtcccccttccagtgcttccctcaccgactcttcccctgccagtgactcccccagagagactcttcccccttgagattctcccctacccagaaccttttcctgctgctgttgatgccaacaacacctctgccaaagcagccccaggtccacgtgctgtgcacacgtgtgcagaggcacacacgctcacacacggccgtggagcatgctccttgcagcctcttcagggacaccagcacagagctgggcgagaccttggaaaggcatccttgaccctctgtgaggagaggcagtggccagcgaccacacacccgcacagagcctcgtccaccctgaggggccctgggatggtcatgagtcccatccttgcccatatgggagaggaacagaggaaaccggaagaagaaacgcttgaagtccccaaatggggactggcaatgtggggtggcagcaggtgatgggaggagaagagatgcaggcagagagtgagtccagcaggctgggcaggaggagggaggccatgccgtggactgggccagggtttgtatatacagttgcctctcactcagtccctcactaagaagcccagtgtggtgccagctgcctgcagctgccgaggttgggtcctcaagggggcacctggggagcccaggggagcctgaggtcacacctgggccagttgagaggctgactctaattcccacagtcctgccacccagaaactaggagctccattttacagaagacaaaaccgaggccatgggaatcaatgactcgtcggggccacatgcttcctgagtgagatccaggatctgatgccagctgcgttgggctccagagcccaacatccctacatttgttcttcttttgggaggaaggggagggcttgcagcctttgttctataaattcgtggttctgctcaacttggggcctgtgcttgaggacctgactttggcctgggagtccttgacctctgcgaatccagaaaggaaagtgggtgagaggacaaaggatgcaagcccccagcacatcagagtccaggcagggggctgccgaggcgaggtgggggagcctggtgcttcacctagctccctggagacatcagcgcaccaacccagctctaggattgagtgatttcccccagcgttgcactcagaccacaggggccagccagccgtcgctttgaagacgacttcagagaaaaggtgtttgatttgaacaatagcccagtcacttcgagagccattgtttttacaatagcaagaaaaattcttaggagagtgaacctgtctaaaacatcttccaaataaataaataaataaataaataaataaataaataaagcagataagaaaaaaagtagaaaatagactcaaacataacatgcctgaaaatccttcaacacatccgtaaatggaaaacccctgcctacagttaaggaggcttcccaaactatagttcatttaactgtccttttaggagtctcttaatcagaaaggtgatttcagtatcaaatacgcttttgcaagtacttttgtttctaaagtataaatagtatgtgctttatactgtgctcgactaatattattattattgtttgagacagagtctcactgtgtcacccaggtggagtacagtggcgccatctcagctcactgcaaccaccgcctccgggttcaagcgattctcctgcctcagcctcctgagtagctgggattacaggtatgcagcaccacacccagctaatttttgtatttttagtagagatggggttttgccacgttggccaggttggtctcaaactcctgacctcagatgatccacccgcctcggcctcccaaagtgctgggattacaggcgtgagccaccacacccgccctgtgctcagcaaatattgtttcttatctgccaaaagactgtcataagatcactgggcataaagtgaaaacagacacgctcagagccccatgttcagtttgctgcctgtggacatcaatttcaccagaaagcatgtctgataggtgccgaagattggaaattcattgatctctgtggccagaagaacaacttcaagtttcccggatcaaaccagagaatcattccttacagttaagtctaaaaacatgaggtcaagcccgatcggtgatcatgggtattgcacatgaaaaggatcggggaatccagggcccagctgaggaacacgaaggtgtgaaatggaaaccttaaacacgcggtctgttctcactgcagtggttatgttccacaaagacctctcagacactgactttacaaatactgaaccattgttcctaggggaaacacatggttaggttcccaagagcctctgaccacattttctttttttgagacggagtttcactcttgtccccaaggcttgagtgcaacgatgcaatcttggctcacggcaacctccatctcccgggttcaaacgattctcctgcctcagcctcctgagtagctggaattacaggtgccccccaccccccaccatgcctggctaattttttttttttttttgagatggattctcactctgtcatcaagctggagagcagtggcaccatctcggctcactgcaacctctgcctcctgggttcaagtgattctcctgcctcagcctcctgagtagctgggattacaggcatatgccaccatgcctagctaatttttgtatctttagtagagacagggtttcaccatgttggccaggctggtctcgaactcctgacctcaggtgatcctcctgcctcggcctcccaaagtgctgggattataggcgtgagccacagcgcccggcccacattttcatcaactgaacaaacatatctctgaaccattactatcttgagtgtacagtcagtggcattcggaacatttgctttgctgtccagccatcgccaccttccatctccagaatgcttttatcttcccaaactgaaattctgtcctcattaaacactaactccccaatcattctctctcaggccctggtaaacaccgacgtaatttctgtctctatgaatgtaaccattctagggacctcatctaagtcatacagtgcttgtgcttttaggtctggcttctcttacggaggcatcacgttttctggcttcattcacactgtgtattctgtgtcaggatttccttccttttcaaggctgagtaatattctctggcatggacagaccacattttgtttctccattcatctgtggctggacgcttgggttttccacctcttggctcttgtgaataacgctactatgaaccgagtgtgcacatgtctcgtccataccctgcttccaaccctgttgggtgtatacccagaagtggggttgctgggagagtcttttaaaagattgtttcatagaaacaagcatctccatggagcttcacctcttgggccaggcggcaaaagccagcttggctcatggaggagctaaccatacccacatcagtcacctgggttggtgggacatctgcaaatgccactggaaacacgtgttcacttcccaagggtcgcgagcagccttttatttgtgtgcaacctgtttcgttaaaaaaaaatctgcctcatttgtttgaagtgtaaacaaaggacaattaattaatttgttaattattcttccgtccttctcatgcacactggtatcaaaggccctgtgtcccagatgtgaagggaacgggttcatttactgatgagaaaccagggagatgccctaaggcagacaaaggggaaaaaaaaaaaagctaacgtggtacaagctttcagaaaaggagacaacgtaattggaatgatcctagaaattctgcaagctcctcttcttagtattcttagtaaaacaagtgggtctgtaggacaagtgccacagctcgcgaggctgggtccctgaagatcggtgctttacacttaacttggtgacagcgtgaaagacgtccttaagtaaaacgtttagaatccggtcgctctcctccctcttctcttgctccccctaccccagcattaattaactagtctcattttctctccctctcccagcacagactccaggttacatcttcatcctgctggtgttggtgtggttggcaagcttgcctgtgtcaccaccaacaccaatgggacacagacgtctctgcagggagacacggtcactcagacgctcagggccaggagggtccaggtgccatcaggaaaatggtgtgagtcaccccactcgcatcctctgttcccagggccaccttgggagaggtcccgccctggtctctgggccagggctccctcaccacagtcctacccctactctagctacccaggttttaggccagttgacctggacatcctgcccatacctctgtcttttaagcagatacaaaatctaagtgtgggagagggggcactgttcccacttctgtcatgtgactttgtactcctcccatggaagcaagtgtattactccaccctgtgacattgtgcttggctggctggctggcttttaccaacagaatgtgagcagacaatgtacacacaggctccgaatgtacttatgcagctgggcttggcctcttggacctctgtcgtggctgggagaagaacctcccttgggagctgctgcccctggacccagccgattccacgtgagcaggactgagccacgcccagctggctcacagcttgaagcagctgcagcacccagcccagcccagcccagcccagcccacactgacctgcagaccccacgagcaaggtgcggttgcttcttgacatttgccatggttatgttctatcaagtcaccgtccacactggattagccaatactaaaccaagggctcccggggaaatacatggctaagttcctgcaagcttctggtcgcaaaagtttcatcggtcaatcagtacctaaccttgttttaagggtgtttctatttaaagacactgtatttcatatatactgttgatttgttaacattgaactcacggctaacagcactagaggaagcacctctaattttctccataagacacgtcacagcctcctggcgctcaggaacactggacagctgtgttgcacggggctccagcgcccttttaaacagtgaaccccccaacggaaagcacaaaaacgtgaagaacatcgcactaagcaggtctcagaaaggacgctttgtagtgtgagagctgaggctggaaggccttgtttgacctcagctgggaccacatgcatctggctactgcaatttttttgctgctctgcacaggtgcaggaagaattatgaaagcacctttaatcttgattttggggtcacaaataaattttagcaagtagatgaatttgcaaatacagaatcctcaaataatgagcatcgactgtaaatgtttgaagccatggacttatggggccgtttgttacgcagcaagaactgacttacacatgatgaagacccagagaacccatgcccccaacttccaaggaggaggagtctggaagtgttggaaacacctgggtaggctgaagtccatgaagcgagttgggattctctttatcctatgacagcataaaaatcccagtgttcacatcacagtgggaaataaaagcctactgtctctctttcaggcaacatgcctctcttgaaccccaacacattctaggtgagttgcatctagctgtgtgattttgtataggggatttagccaagggagcaagcaggcccagacaattgtgcattgtacttagggaagagaggattcaattcatagtacttcaaaatcctgactctgaacttcagagaaagctgtgttttactcaggttcattaatggggagagaactttttctctggagatggactccggggctacggggaatcaggtgatggccaagcatggctgggaccctgaagaatggggtgacagtgctcaaagaatgactgtgctccaagcaggctcctgtccaagcaggtgaaaatgcaagttctaagtaaaaaacgtgtgtgaatccgtgcaaagaaaacaccaaggaaggtaacatcacgaaaaatacaagtttctcctctgcaaaacaaaaagacatgatttttgtggcccccaaagccttccccttttccttcaatctgggaccccaatatctggctctgctgggtgcgtcctggtgccagcgtgtctgccccccacctccgcagggtggacagtgagttgtgccctctgcctctggcctgcctgctggtcaccagaggaagctggttctcagtttggagtctctgtcccatggaatggcaccacatggaggttggagtgtaggctctggagccaggatccaggtctgccatggaataaaggtacctgcttatgctttaaaggggggagaaggaagaaagctcatgccctgagtgtcccccacatgtggctgtccacaggctgccagagctgattccaacacaggcttgtccccatgcaggatctgccgctgtgtggcaccccttgatcctggttcctgagcctacgctccaaacccatctctgtacccagctttacctttctgtagaaggagaatgagcacagtcaccacctcctccagggcgtttaggagtaaatgtgtcaacaggaggaaatccctgcaacagagcctggctcctggtaggcactgacaaacgttggtccccgggctcaggcccgggcccctgggccctccagccctgtgccccattcccctttgctggccaggtgctggcattcccattggtttgcatttgttagttcacagggtgtctccatgcaggtggttctttatcagtggtgtgtggcttatccacaacagccttccagtccccgatgtctcccagccaccttgcacatccccggccacctcctcccacactccagctctgtgtgctcggggaatgcaaagcaatcttaacattgttctaagtcaaacataattgggaaggtaaacctatagtgacaacagaatcacagactgcattccaaatccacagaaacggcactgggatctcagacgctccctgcagctgttttcaccgcccccatgagacctgcaacctgtgaaagagcagagggagcctcacttccccaggcccatgtgtggattcttcatgctggtgggtctacaccacagagcggggttctagaagaatgtcagcaaacacccccgggtaggcagccgctgggcatctgctgtgagtgggcactgtgcaaacgtacaggacatggggctgcccacaggatgcctggcttgggtggggcaggcagctccattggcagctgctctaaggcagtgctgggtaacagaccagggcaggggaaggtcattccgaaacacacatgcttgtgtgtgcacatacttgggtgcagctggacagaggggcatggccccgggtgcacctaagcatgagtacggttgaagcagaggccacatagaggtaccaaggcctggtgacagagggtagcctgaaagtccagccccatgggcgggacagggctagagggcagctggagagctggcagagcccaggacacccgggaggagctgagcctgcaggccaccaggagcaggtggaagagcaataggcagatagatagatgtggggatgggaggcaggcagcagtacgtgcctgggcctggagggaccagatgattaggaggccagggagctcctgcctaagccctggaacaaaggcgcctgcttatgttttaaagggggaagaaagaagaaagctcaggacctgagtgtttcccacaggtggctatccacaggctgccagagccgattccaacgcagccctgtctctatgcaggatccaaggcccaaggcactgggacctcaccagcctcagagccagggagcccagggttcatttttgacaaaaaactgccacccaccccctccacttggcccctggtgatgctttgacctctccggggagctggggcaggaggaggggtgctgtggccagagccgccatcttctgtcctgggaagcactctgttagagatgggggcccagagagtggagtctcaactgaggctgaataatttcaatcagcctacaggccgccccgattcccttctccaacagggacctttgagtgctcaggagggtctctggggtctgcctttgagcctccgctttctctcctctggattccccatgctgacctcatcgccaggcctgagggtctcaccccccaggagcccccctggggtctggggccgccccatccccaagccccagaggttggctggtgcctccactgctgccggctggccctgactgacagctgcccatgcaaatattgtccgttccaagctccagccggggaggccgggtccccctgcccacccgctcctcctggagctcctccagaaccttgaagagatgactcaataaatgacgagcccagggaggtgcgggaaagcccatagcacctctgagctgagctgcctgtcaccgtcactgccactctgtgacaccagccccactccaggctctgaggtcctggagggctgctggagagctggcagagcccgggacacccggtaggagctgggcccccaggccaccaggagcaggtggaggagcaacaggcagatagatccatgtggggatgggaggcagacagatccatgtggggatggagggctggtcttcaggagtctcctgggcaccccagagtcaggaaaccccattcccaaatgccaggctccccagacttcccaccctaggccggcatgaggccttggtcctgaaacctgtgtcatctcccaaagggtatttccagaaggcatctggctcctgcctgactgctctgccctttgggaatctggaaaaccatttgttctagtgcctgacatacatgcccttcccttcttcatgagcagacctggagaggcacatgccacacacatatactcatgtacatgcacacgcattcacacacagatacatgcatgcacagaggggcacaagcacaccatgcacacacatgcagacacaggtacacatgtacacagaggggcacaagcacactatgcacacacaggcatgcacacacaggtatacacaagcacacatgtatacatgcacacacacaggtgcacaggcgcacacacacacacacacacgtcaccaccagggctctaaatgcagctgcagtgaccttcatgttgttgaaaagaaaacctccttctgtgctgctggccagggtccctggcagctctccctgctctggcccctgagctcaggtcctaaccctgcaggcccagtaggggcaccgctagcgctgggttctatgtatcctactccctcttgcccagtccaaccagctcctccatgatagtaaacatgaagtaaaacccaccctgtttttcatggaaggatcaaggaggatctgtaagctactcttttccctcctctccaagatcaaatgatgagcttcagcctccagcatatggctcccaactcccaggtccatggctctgctctcctggatctctaaacgctgatctggctctcctggatcttgaacattcgccctcacgatagcggggcagccaggctgcacagcagtgggctcctttctctggggtcactccccgtctcctctcccctctaggaaagcctggcccagtaccacataggtgaagtcaggggctggctgggggtctccccaggggccagcaggggccgtgcctacaatcggactaggtcaggcctcatcagttcccgagggcactcacctgctttgcttggcttctcggccatgaccatcacctgcgtttcctctagaagggaggagtgcccccgagcaggagctgaggggagggatgaaatctggaagtcactgcctcagaactggtccatggcacggcagtaagagaaaatgagttctgggtgtgaaatccccgaagctcaatattttggtctgtccatacatggggcaggaagctggggaaatctcccttttctccctcctcccgaaaccatcagcttctttacaaattccccagctcccaagattttaattttacagttcacattttctcccggcagaatcccaggatgacgaggtagaaagtctgccctgattaactgtccctctggcgctgagcagggcccggcgtgataaatagcaggaataaaaccgagagaggcgcgcagcaagctgtcggcaggtctggccgtaaatcccagctctgatggggccgagatgagctgggggctttatggaggggaagagaggctgcttgcagagcagcaccccgctccccagcccctccccagccctcctgatgcccatgcagtggatatagtttaagtaagatagagcgaaatcgctctgttgtgtcattgatttttaataaaaacaggtaacgtactgcaaatctcactgtgatttcatctctcctcgcctttgcccagatgtcccgtaacctcccctaaaggctccatccaaacagcagtgaccatgactggtgtctggcaggcggtggactcaggattttgagaagtttccaggaggtctaggctgttttccctcttgacatacacacacattcacatacatttgcgtgaacacatctgtgcatacaggctcacaagatgtgtatgtcatgcacacactcagctcacacgcacactgcacacatgtatgtccatgcatgtgcaagcatgatcgcatgtgcacacgtgcctctgcacatgcacacacactcagtggcatacaccacacaccgtgcatatgcacatgtgtgcgtaagtgcaagtacatgcatgcacacacacatacatgcacacacacacataccagaccttcctggggagaggcacaagccaacactgagctctcctgctgacccaactctactctctggtgaccctgagtctgttatgaataatccagaacattccaggagtaggagaaggcacacatgtgcagacgggaaaataggagaggcgtcagagaaggaggacgcaggaatggcatcaagcggcaggggaggggagcgtccctgtcagactcatgaggctgcccgagcctcacacccgggccagagggcacttggggggatctgggctgagcggcaacgaggacatgggccaccagcgataaccaggcctcctcaggaggcctctgtcactttcaccagccttaccgaacagagataaagccgtgtctaatttgcagctgaagcaggcacactgtttacctgttatcagggttaatagcgtccgtctgagctgcagagacagcgctgtcctgcggacgggccgtgcttttccacggcatttcccatgtcccagggcatttttgaaaatggtggcttcctttagggtcacatttattgtcccctgtgactacagaggcaggtaccatcctccccatctgatgcaccaggggcccgagtgacttgcctgatctcctagccagctccctgccagctggggctccattggctatacctgggccggccgaagcccagaccaggggagccgaagccggtgaccacagggcagggagctccgtgacagcctctgccgacctctcccacagcagtgccctcttcagattttcctcattggccgtccccactggacttcatttttagccatggaatccacaactaaatcacctctggaccccggaccatgcccctcgcaccccaactgtgagaaagcctcacccgcaaggttgacctttgccctatggctctagttccccagcacaacctcctgccataccccccttccccatggccattagcccctccccaccagaggaagggcccccctgcaccccctcatcagcatccacacccctgctcctgaccacggcctcccttcacccagggtttgtccctcagaggcctcctggtcttccccacaccccatacgaggggacttggagctcttttcaggcccagccctcgcacggtgagtcggaaccagatcagagacatgcatagttgccgcacaggctggaaatgtcccgccagagctggcttgggcccaggggcagctttgcaggcaggtcacacacctgggggtgcagggagaggatgccgagtggatcaggaccccaggaaagggcgtcagcggaggcaaccagagacacagcggaaggatttgtggaaagagaaatcgcctggggcagggtcatcaggagagggaaataaacttggcccagagatgggtccaagcgtgagaaggagcaggtgtgacgagggtgggccaggctctaggccagggtcctgggcgtgcctccttcctcccggagcctcggcctgcaggggctcaatagtggcccctaagattcatgtcctcctggaacctgagaaggcaaccttgttggaaacagggtctttgcagatggaagtaaggtgcagatagagatgaggccatcctggattagggtgggccccaaatccaaggccagagagacaggagacacagaggcacacccagggaggtggccacgtgaagacagagcagagattggagagacgctgccttgagctgaggaatcccagggacagcggacagcccccagatctgggagagaggccagggacagattttccctccaagcctctggaaggagttagccctgccaataccttgatcttggacttccaacctccagaatggcagagagtccatttctgttgttttaagccccctagtgtgcggtcatcagttacagcaacccccagaaagcagtgctgcgtccttgcctgggaaatgagggtggagccccggcagaccccagggtgggtcttgggtgggaacacacactcgtggcccacaggcctcggccagccagggctgacgtggtgctggttcagccctggcccaggcaggtgcttagtgaggcaggtgaaatcaagggtctcactgaatcaaaacagatggccgtagagaaaggcagaccaacaggtcaggagcccgggccccgccttgaccttggaaatcctcctcaggtcccctgaggagccacttactctgggctccagccccaaacttctcagggaagcttccaagagcaaagatgctcttcaaaggccctggggtgaaagggacgtgttgggagacctgaccatccacggccctctcctctgtccctgctgagcctggcctgggagggaggggaaccccattcggcctccaaccacagctgctggggaccactggcagaagagagaggaggagggagggggagagagagagagagagagagagagagagagagagagagagagagagagagagagagagagagagagggagagagggagggagagagagggagagagagggagtgagggagggagagagagggagggagggagggaggaagagggggggagagagagagagagagagagagagagagagagagagagaaagagagacagagagagagagagagacaccaagcagggctgggtgagttgggtgtcagggtagtaaggagctcaccctgcaaggccccttgtggtgagaggcgtatggtaagagctccaaatggcggtggctgctgttgctgggatttcatgacaaaatgcagacacaaaggacaaacccagaggagggagccacctaggactctgctacaattgtgtgtttccacctagtacctgccgtgggggctgctggtgctccaacctcatttcccagagaggaccctgcactgcttccctggggctgccgtaactattaataattgccagaggaagctgcaggcagagccggaggggcagactggggtgggggtgaggaggggagagagggtgaggggaggacacctcccagaagaacccctcccaggaggacaggacctgaaggtttcttctctcagctcccgggtagaatcaggtccgtgcatgattccactccttgcttctggtctgaagctccccacagccacaatggaaaatctgactgacttggccttaaagaggtcccaggccatgaagcagcgcccagcagctcggcattggtcagaagcctccacctgcctggagaacccctggaaaacatccacctgtgccatgaggtcctcacaggccaaaggtgcacatggacgagacagtggtggcctctgcccctgtggacaaaaccggagctcagcctcccatgtcgcctccccaaccagccacctgggaacccgaggaagtcagatcagccgaaggggcccagcgtccagtccaatcctgggtgctgccaagtcccctctgccccaacaagctgctaggtgtgtgtcaccaggcctctgccaccggcctcgccacgggggagaccaggccaaggccttgccaaacacacactcacataaatgcagtcatgcttagacacacacaaatgcacactcacatacacccttgcctcttttttttttcttttgagacagtcttgctctgtcgcccaggctggagtgcagtggctcgatctcggctcgctgcaacctctgcctcccaggttccagtgattctccttgcctcagcctcttgagtagctgggattataggcacctgacaccactcccggctaatttttgtatttttagtagagatggggtttcaccatgttggccaggctggccacaaactcctgacctcaggtgatccacccgcctcggcctcccaaagtgctgggattacaggcatgagccaccgcaccctcttgttcactgtctcacatgtgcacacactcgttctcacatgctcacactacttgggatcgcagcctcttctcccttgtctaatgaccacactgtcccactgcctccctcggcccccgaccctttatttgctgagccccagagtgaccctctgggatgatggtgggaggggcaggctgcagagaactcagaatgccaacaaggagaacagaaatcctacagggtacccgtgacttactgggctatcccgagtgccgtgacacttcatctcatggtgcctgagacaggcactgccatccctcttcccatctcccaaaggaggaaactgaggcaggaagcaaagtcaaagctcataccctggcaggccctgctcacaaatgcacacctgtatgttcagggtggctacatggaggtcagtgaatcattagggggacagaatgtgggaaggatacattgagagggacaaggaaaccctggggatatggagagaaaagaaggccaaggagggggctgcagaccggacacccacttcaggtttgcccagcaccctcaggggtcagccaacttctgtgacctcagctgggggactgggagccccttgtgggttgggggccagcaagacccacccctcttatggcctgtgcgtctggctcaggtccactctcaggcaccctgagcccagtgaggttggaagcagctgggcatgcatcaccgaagaccagccgggggaagaaacctgagctcacagagcagatgggctgagcaacaccccatgaagtcttgagccagcccaaagcccacataggccggtgcctctgagccacagctccaaagccctctgtgcctgaccccagcctccctcaccaaacctctctccaccacttcctctgggcacccaaggctaccctggactcctctctgtcccctgatgtgacctggcttccagagtctccctcagacacttcccggactggcctttcacaagccctgggtctagatttgtgccttataagcccgcatttgctccaaactaaactgtgggctcttctcaacagcgtgcagtagagaagagcctacagtttagtcttgagcaaatatacattcagatatatatatagtcagttatatatatgcaaatatatatatgcagttatatattatatattcttccagaatatataaggaattacaactcaatctaattctagaacgttttcattgcaccaaaaagaaacccacacccattcacagtcactgcccatccccaaccacaggcaaccacagatttttctgttctggacatttcaggaaaatggagtcacacactctgtggccttatgtctgtgtctttcactgagcatgacgtcctcaaggttcatgtgtgttggagcctgtgtcaggtttcatgcttatttgtggctatataatattccactgcagggacagactccattttgtggaccttttcatcagtcgatagacattgagttgcttccacattttggctactgtgaatggcgctgctgggaacacgggtaggtgtgttcatggcagacatatgctttcatttctcttatgtatattagggagcacattttcttgtaagggggtcccactgcccagtgggaatgtcaggtgaagctcaggctgcaggagccaaggatgaaaaatgagtttctaaatgacagcggcctgggtgagggccttccacgtgcgggaggcactgcagggctctggggtcttagaggaggagactcgattctctaagaaacctcagccacaggcctcaggacccgcctcgatttccaggactgtctaccccagcccacaagcagagcaatttccagatcttcaagacaagcccacttccaggatcatctctccccacaccctcctcccctgtgatttcccttccttgctgtgccgagctcagagcccacaaaaagcatctgtctgcacagcctgctttcctgggggcaaagccggggaggcagaagagtccaagatggggcattccaaagcccaccccttcctcctccatgtgctcccagagtcacaagaagctgctcggctgggtgttgccctgttttattgctagaaccttctgattcagccggggtttgcaggacagtccccaaatcacttggccttgggaaggttttgcagagggcaggggctctctgagtctgactggtggacctagggcaggggccctccaaccaggggtgggtttgcccctggggccatttggtggtgcctgcagacatttccagttgtcacagctgtggctgggggtgatgctggcacatggcgagcggaaccagggatgctgctcatcctacaatgcaaggaacggcctccacatgagagaatggtcccccgacatgtcaacagtgctgaggtttagaaaccctgccctgaagggtaggggacctgggaggtgacagctcctctgaggctctgaactcctcacccagcatggtcggtcaagctgagagcacgctggccctagagatggtcaggagcctccagggccctggcgatgctgcctccatcattcccatactccaaggacacaggattccacacgtccaaaaattccagcagctcctctctctgctctaagcaggacatggctgcctttctcctccaggcagcaatgcggcagacccctggtcagacctcagggctgggaggagaggaatgattgtggtcatgcctggggtctcacataaactccctccacccctattgaggcaggaggtggaacttgactccagaggtgaggctcagacatcagaccaaactgaagactagccaagcaaacgggatggaagcagctctccctaagatatgcccactagcgtgccatgttagtgtaccattgctatggcaacgctcctgggcagcacccaggagtgactgcccatttccacggcaatgacccatgacccacaactcaccaccctttttctagaaatttctgcataacctgtctcttaatttgcatgcaattaaaagtgggtataaatctgactgcaaacctgccctgagctgccgctctcagcacacggcctatggggcagccctgctctgcaggggcagtcacggagctgcacacggcccatggggcagccctgctctgcaggggcagtcacggagctgccacgtcatcacagatgtaacaccacggcttcaataaagctgttttctcctaccattggcttgctgttgaattctttcctgagagaagccaaggactctcctgggctaagccccagtttggagtttgcctgccctgcaacacgagtacctgaggcacagccaaagcctaccttgggtgaggctggggcccgtgtcaacctgggcctcccttcaaatgcctccattctgtctcttgatattatctcaaaacaagcttggacgtgcagtccctgccttccatgtgtgcagcaaatgtgaatttgtcggcagtaaacatttcaaacagacctgaagttctgtaacccgctttcggcatgcctccatttttcagtcgaactggagcttcttctgccagtggatgcagcccaggtctctgccaccttctgagaggcccatgagcaaatctcagggctggagctctgagccgcagggaaattaaatgtgcagcctcatccatccagccacctcactgcacaaatggtcccacaaactgccactccccctccacagatgccgtgtttgctggcagagtgccggcttcatctggaaggttgtgcctaaccgagcaggcatgacttgcctgtgatagcctgtgacccgtctgtctattgtgtacggtgatacggtgcacagtcccattttacagaaggactaactgaggcacagagaagtcaagaagttgcccaagatgcagcacagggagggccaaggggctgaaattgaagactgtgcccaagcctgggcttaaagcaccatcctcactcccttgcctttaccttgtggggattttcttacaggcagttggggaaggatttggagggctccttctctctctgaagcttcatgccatccatgtgagcattgctcagcagagcaggctgtgggccgtgctgaggggcggccagggtgagccccaaaatgggtgatatggttcggctcatgtcgctacccaaatagcatgtcaaactgtaatccctaatattgggggagggacctggtgggaggtgattgaatcccaggggtagatttccctcttgttgttctcatgatagtgagtgagtttacacaagacccagttcgtttgaaagtgtgtagcacctcccccttcgctctctctcctgctgccatgtgaagacgtgcctgcttccccttcaccttccgccatgattggaagtttcctgaggcctcccagccacgcttctggtacaacctgtggaactgtgagtccattaaacctcttttcttcataaattacccagtctcaggtagtttttgataacagtgtgagaacagactaatacaatggttcaggagcccccagaagagggggtgggggtgtgagagtctggaaaactgggcagaagactctaaactgaaacctttggacactgtagtaggttaaattgtgtctcccaaaaagatgtgtccaagtcctaacctgggacctcaagctgtgaccttatctggaatgagggcctttgcagacaaatttaaggtaaggatctcaagatgaaatcatcctggattatgatgggccctaaatccagggatcagtgtcctcataagaaacagaagagaagaatgacacacagagaaggccacgtggagacagaggcagggactgcagcaatgcctctccaagccaaggaacacctggggccgagaagctggaggaggcaggatggaccctcccctgaagcctttggagggagcacagccctgcccacaccttgatttcaggcttgtggcctccagaaatgcaagacttcatgtctgctgttttaggcccccagaaagcggtcacttgttatatcagatgcaggtcactcatacagacatactcaaggactggggctaaggggcttcaacttgcaggagctcccagagcaggttcaacaccaggaatctggcctcgcaggctcagaagtaggccatctccctctccccacctggacggcagcccctgatgaagggaaaacagcccccagacccctcatgcaggttccctgacacagagaaaagggccagaaggatgtggctcccatggtgaatttggctcagagttgacgtcctgggcactagaagggtcactttgccagccacgctcccctgtggaccctcacgtctgcctgcctcggccactgggttggagctgctttgccaggttgggggtgcacaggtattagtcaagagcccagacccctcttcctgcctgtgcctgtagtcccttaccacagagaggagagggagagcaaacaaaacccctgaagctgagaggttcgggtaggaggggcccgggatgggtttctggcactgtgtgtttttttcagcttctatgaagaaaattaacaattacagtagaagctacatgaaacataagcagaggcctgtcactcacctctcttgcttcctgtgctaacccccgttaacccctttctgcccccacgatccttcctccctacagcctagaacacgggctgtccccaaactttctcccttacagttcccgggtccccctctcaacctgcctccaggtgagtctgcaaaatttcctgggctctccccaaagctcaccccagacaccctaatccaattcatccaacaaaaccattcagaagcctccaacaacttctactctgaaatattctagaattttgcataattgccaattaaggtcagttttcatcattcaattataggtgaatatactgatgtgcttatttgaaacctgcacacataaacacacacacacacacacacacacacactttgagtctggccacccgtagacccaatggagcatctctgctggtggacgttacattccggatgctggatggcaggtgaccccagctctgggggcgcacatacatggatgcaacctcttcacttctgcactaagaaaggagagtggtctgggcaggagaagactcaagggttaaagtcacgatgggcacaccattgtggtgggtggctggccccctcctggccattgttcagcagggtcagcatatttccatcttccagccagcccgctcgttaattaatcactcattaggctaatcacagctatctcgtttcccactaggggggaagatgttagcacagtggaatgccaaaaaagcccaaaatgcaactaatgggtctgtgtgaagaggcagaaagagagaccgtggaacgatgggacgtttctaacacctgacatacacacacacacatgcacacgcatgatgaaacagaagccatgtgtgtgcagaaactctctcaacatggatgccagactcaaggaggtcaaaagtcacccgtgggtgtacagacactgtggactgccctcccgccctcctgtaggcgagagttaagcagaaaggaaaagaggccatttccaatttcaattctaatcacttcccttctcaggctgtgaatgaaggcctggacttggaacaagagctactttggcagtaggaagaataaaacggggaaaaaacaccggagcctataggagcacctccctacagatgtgaagaggcaaatgccgaggtattggcacagatgtccccatcggagccatcctgggatggggactccaggaaaacgaatcaccccaaaattccaagaggaattacaagttcatccaaacacagaccaccctggacttctgatttttttttttatattatgatgggcttatcagggtattaaatatattttcaacttagcaataatttcaacttatggtgggtttgttggggtgtgacccatcataattccaggagcacctgtatatgggcctaaggaagaagaagacaagaacaactattagcaactcatcgtgatccaaagtgctacactactgaagatcaggaggacccctgtctggcaaggattcgacggagctcccagggtagcctgccaagaaaatagcactgtgcaaggtgctgtttgcatgcataacaatgataagactagtcccaaaagatatatgccaagaggagagaaaaagtaaaactctggctaaggaaacaaattcaagaagtaaaacctacttttagaaaagcacaaaatgagattttctaaatcagagctggcagccttcaattagaagggggtgcagcattctcatccgagagctctgactcccaagcccaggctggggggcccgatggctcacccaaggcagtgttttctgtccagaagtttccacccacaaatatgccaaacccttcctctcgcctgccttgcttcactgggacaatttgctatcgaaaggcacaattatcaggggacatatgatgtttaggagcatcatttggaagaagttatatctaaacacctgagtagtaaatgagaaaaaaaaatacattaggaaatttggttttaaatgttttatgctaatttattcggctcagtcaagtgcagtcaaccctgaacccccgggactgtcagtgtgggtgacaatcacaggcaaagacgtgccgggaagacgttgtcacctccgccgagctctgaacccagaagacaagcttgtcaacatctcagaagcatcatcttggggatagagaggaagctggggaagtctgttcaaatcttccctagagacaaatctcttcaccttgactgcagctcaactgttcagcctgaatcagggggtgaggcctgcccttgaattgcaactggcaggagggaaaatgacctactctcagatggggatcacctacgaaccatcacagtaagttaccctcaatgcaagaggcatccgtggagcacccacccctggtgaggaggcagcccaggctcaagccttggctctgacactcatgggcagggaggccctgggcaaaccactgggtcccccgcaaccttccatttcatcctctgaaaaacggtgacaataagcgtaccaacatcatcagatcatcatgagtactgaatgacagcatcgcagtgttcgtacgttaggtggggcctagtgcccaagggatcatacgtgcttcacgtctggagacgcttccacagaacaccttcccccacgcccacagcatccctgccacccagtactggcaccctcatccacacaaattacaggggggtaccaacacccgcagggctcttttgagtcctagagagcccagagggctttacgctatgttccctgtggctacaggggaggagaattcagctggcctagaaggatgggtagaattctgaatggttgaaattaaggagaaggaagttgctggaaggcatggggcagacggaagcatggaggtgggaactgctgaatgctgtgatctggcaggaacatgggatgtttgaggaggaaggcggaggtgagagtgtaggggctagctgggaactgaactttttagagagtaagactgggagctcagatgggcaatcggcagtgcaggatggaggcccaccctgtcaccacctccgctgcggaggaacgcagcagtcatggtggaagggaaggcggatgggcattctttgtgcacatgccttcgacgcagaaggcagagctccagcaagtcactgacgctccactgtcttgggacagatggatgctcagacatggacgtggtttatgattgtccaggttgaggctgttggctctttcttcttcagggagaccgtcccctgccctctggcttctggcatgcagcagcgaatgggtcattaaagatcaccttggaggtgggggagtgggaaagggaagttagggccatcaggggagaatggggtcacagagcggagaggggaggctccaggaagaaagaagccacacagcagggatgagggaggggaccactgggagagactcggacttggtggccacagcccctgccaactgctggagaagttggcatctccctgccatcagtggagaagcaggcccggcagggtcaggaaaggtgaaggagggcacagagagcttgcacaacccgggggcattgcagggaagaaacacccttggcaggctcagggcctttggaccaagaagccagtggagaggaagcagcaccgtggtgccatcccgctcacggccccccggccacctggaccacgtctcccctccaacacccactgagacgtgcagcttggagcacatggcttcatctctccaggtctcggtttacccatctgtggaatgggggtgatcgcagggcctccctcaggagattgctttgaggatcaaatgagcgaatttctgcagcagtcctcaacctgcagtcacggcagtgtgtcctttctgtaaacccgggatgaaatgctaatagccgtgtcattctacacatgctatgccggagctgaagagtgcgtgttggctctgcccagacccagcggccatgctggccacaccctaagtccagagcgatgcccagagaacaaaccactctaggccctctggggcagtggcttcatctcatttttgaaagggggagctgtgtggccagcagagatggccatagaagctggggcgtcgcagtggggcccctctcttcctcctggcggcagatggggaggctggccctgagtggccagctcagtggtcacagagggacaggcctcatctccttggcaccctttggggtggtggaagggaagctggtgggaggcagggatgtcacccagagtcccaggataacagaggggactggcaggccgcctgctgcagccccacagccccacaggggttatggagagaaatagtgccgtttaagagtgtgcagaagagtgggtgcggagatgtgtgggtatgtgcaggtgtggccaggcacatggggtgtgtgtgtagatgtgtgtgcagtgtgtgccggtgtgtgcagaggcatctctgggacaggactggggctggtgagcctcaccccagaggaccctgggggagagatcttctcccatgttctgccagctccctcaggtccccatgcaaagctgcagcctgacacgcaggcatgagggaggctctcgaaacagcttggctggcagaggagaggaaagggggctgactccatgcccaggagctgagttctgggatcccttggacacctctcagcccggggtggacagcaggccatgacctggggcggtgctaggtgccatgtgccccccatggtgagttgggaagcgtctttggtgacgtcctgtgtaggaaatgcgctctgacaaggggttgcacaggagggcacctctcagatgcgccaggggaggcaatgccgtctggagccctgccccatcacctctgctctgacccccatgccaacctggcacctcctcagccccttctgcacctctcccctgttctcagaagggtggccaggacccattccccacccagccgcatgccccaggcctgggcacatcattctggctcccagggccctcccttgaggcctctcctcagcatacccccaaatccagcttccagggagtccgaggctgcctacatctgtcctgccccagggccaggtggctctgtctgctgtatccctgcccagcccctcctgcccctcctggcctgccctctgcggaggcccagccccgccacctctctcatccaccaacctcacctctcctgggatcaagaacactgccgctcccccaccttgcccaccaagccctcccagcacccccaatctctagctatttgtaggtcctcctggcctgtccacagcaaaggggtccactcactcttggacccagtcaagaaagtccaaggaagaatttcataccgtccggccctgtgcattaccacacagggagaaatgggagtttggcaaggaatcaaaggcccagagaggttaagcgacctgtctggagtcacacagctcattaggcaaagacatctgacccaccttagggctcctgtggcccactccagaagcagccctatccacactgactggagcgacttggaagatgacatgagctgagccagggtctcatctgatggccccatgtggtgatgggcccactcccattgtagctcctcagtattcaaggcctggggtttgggggccctgcacccagaggcaggagatactgcctacctgcacccactcagactgggctgctacagagccagccacgtgcacgaggcccgacagcatcccccatggggtgtgtgcaggcctggcagcatcccctttatggggtgtgcacaggcccacagcaacccctccatggggtatgtgcacacaggctggacagcgtccccctccacggggtgtgcacaggcccggcagcatccccctccatgggatgtacatgggccccacttttcttgtatcttaaaaatgagccccataactggaggaagctggatgtgctactcccaggtcagcagccacaaaaggatccaaagacgcgcaggctaccgtgacgggggagcggagagggggagaggcaggccctgagcagtggcatctggggaggagaaattcggaaattgttggccaggaagaaaccgcaccacgcttctgcccaggagagaccacctgagggtcatccaggagggtcagtgttaactgaaggtgggaatcagatgagcccaggagagtggccatctgggtccagaaatggccaggcaggactccacgggagctgccaccacagagccccatggagatgccacggggcccgtgaaacctttgagcagaggccagggagggtgaaagggggaggccaggcacacgggtgtgtgcacacacacacacgcacgcagtcacacactcacatgcgcacacgttcagaggaacctatccacacacacattcattcacacacacacttccacaatcacattcacagacacacatgccaccacacactcgctcacagcatcagacggacgcagacattcacacattccacactcacactcatccacagagctgctgtcacacgcacagccacacacagccccatgctccacatgcacccttgacacctgcagcggcacctccagcctggcctcccccgagggccacccaggtgtccagtgctacgtggcgtctgcctctctcggacattgcactaaccaggtcccaccgcaagcctcaagaacatcacactgatgaggctccaccccaaacctcaagaacttcacactgacgaggctccaccccaaacctaaggacatcacactgaccaggtcccaccccaagccttaaggacattgtactgaccaggccccaccccaagcctaaaggacatcacactgacggggccccagcccaagcctgaaggacatcacactgacagggtcccaccccaagccttaatgtgctcccgagcctgttcctctctcacgcagtctttctttctgctactcaacctgaaaatctgggcatcatccttgctctgtcctcttctcctaaccctcgtcccgccaactctgtttgttccgcctcccactctgaccctgtctgtcccctccaggcaccatggacatctggggctgggtccttcttggtgggagcatcccgtgtgctgtaggatgtttactggcatccctgggtccccacccactggatgccaggggcagccccctccccagctgtgacaaccccagacattgccatgcatcccctgctggagagaacccgccccagaccaagccccagcccctctcacccaggctttgcgctgggttcccaaagggtctctctgcctctgacctagttccttctaaccatataccagaccattcttttaaaatattaatcggtgaatttcagagatgccatcattttataaagacactgttaaatgcatatttataccaggccagagcccctcctgagtcagacccccgggagttcccaccacacttgaattgattcaaaccccccagggcccttcagagcctgcctctgcccaccctggcccggccggctctctcggtctttcaaacacaagctcgagaggtctgggcacaagtcagtcccactgcctggaccagccctctactctctgtccccagccacccactcagcacagggctgcctcctcccatcctaaatcccccaagttgttctgtatcacagcacctgcccattcccatgggagtccttccaacagttagtcatgaattgtatgtgtgtgttataggcagaggtacaggcataggtatattgatagagaagataatgagataggttgacacagatgacacacacgtggcacaggtgtagacaggcagggtgaggtctacaggcaccctcctccccagggcatgggctcctgggggcatggctgccctacttcctggtcccctgagcagaaggcctgggcccatgtccagcatggagtagggccttgttagaatatttcagggttgatggtcggacggatgagggcctcatggcatggcctcgggtagcagtggaaaaggagctgttgtggagacacaggacacaggctggaatcaatagctctcaccatgtggtgtgtgccatcactcctcactggggtgttgaggggaggggttgctttaatatggctcatgaatgggggtacggcctttctaatctccgcaaatgtcatcgacttccagagatctgtgaaatcacccaaccaagacacgtggccgctaactccttctaacgcgccttcatgtcctgctcaacatcccagcggctcttcctgaagcccagggccagcagccccgtgtagatgccccgggacctccgtttccggggcagttggggcgccctctctccccaggacagtggcagtgtggcagcacagagcaacagctggtctctgctcccaaagagatgcagagaatgaatgcgtcctaggccagccaggccctggggctgtccccgcgatgtccctgcacacaacagccatgagatccctgccctcaggcagcgagtccagtgtggggaggtgcaggaaaacccttgagacccttcagtgcataaggaaacggaacgtgacctctaagagcagaggcgacttgaagaacacagcccagcacaacggcagaaagaaggtgttcaggaaagggtgtggcagtcaatggattcctccagaaaacacggtgggtggggagccagaggtccttgcatccagcagtcaggccacagcacaacctcacctgggccagggcagcagaaatccccaagtcccttgacctcgcaatcatgcaaccaggcccaggccatctttgcagggcgggggacccgggtgtgcctccccaggtgggtaacagagcaggcagttgggcagggaaggagcagggagaggtccgtctgccaggcccacatggtaggcaggcacgcagtgtctcgaagcagtcggcgcacacggttacccttaatgggactgcgctgcctgactcatatgctctgaatctgtcagggccttgtttttgttttttgttgggaaataattacggattcactagaaggggcagagaaatgtacaggtgcctcgcacccttcactcagctccccgcaatgttgacgtctcacgtaaccaccatgcaaccaggaaaccgagatggggcagtacacagggctgactcagattccccagtgatatacacacgtgtgtgcatctgtgtgtgcatgcctgtgtgtgcgtgtgcgtgagatatgtagctctttgccatgttatcacatgtgcagcatcgtgcgaccatcaccgcagttgagatacggaactgctgcatcagcacaaaagcctgggttggggtttatttaattaaaaaaaaaaaaggttgaaaactaagaattgtcacagcaagtaagtgagctcttctgcagtgctagggcagctcagctgagctggggcgggggcagcagctgggcagtctgcttcctgagcggaggagcaatttcctggtgtccggggactctgggtggcaaatcagggagagaataaggagcgagatgttgaagccctcacccctgccacaggaggcccagctgagaaacagccaccagcttcctctcctgttcctgccttcacactcccctccatctctggttcccgggtactgttccctctctctgtccctccaagcagcatggctggatctaatggcaagcacaggaagctggggcacctgcctgtgcagaatgtgaagcgcggccgtgggctaccaggcctccacctgtgcccacttcgtccttctcagggtctccctgtctgtatcatctctgcagcacccagacctgaccagctctgcagcccaggcacacagaacccctcccctaggcactccacagcctgctgctcccaagagtagagtccccaggtccctcttctggcatgactcacaggcccaggtggctctcagagtgcatagggacagcagcaatgccgcagcgtcacctctatggggccctggaggttccgaggctctggaggcagagagagctgctgctcttccactagctggtgctggccatgtgggaggcgctggggaggctggagggcaggggcggatgtgcagagcgttcaggactctcttccctccacccaccctccaaggctggacttcatttttctccaagaagtggggagtcctgtggaacccagtgtgaccagatggtacagagcacagtggggcggatggcactgggcaacgtcctgcccggcagaggaaggggatgccaaggaccagatggtactccaggctgcaggacaccaggcgagggaccaggcaatcacggggcagtgctgtgttcccctggaagtcaagtccaccacccccacccccaccaatcctagagacttccaggccaccctcaacactggccaccttcttaaaggctaagaataaggtcccttgacacaatggcaggtattggaacacacctgttccttgcaggtgggacacagagatgatgatggtgaggttgggggagaggggatttaagagtgaggggtatgggattcagggttactgtttcatttcctcattctacaaacacattttgagcaccagaaatcttcagaaaatagtcccacatgtctattgtgtgactggaatagtcaatagtcaaacgtcccttgatggttgaatggataaactcaatggtaggtccaagcagcggaagattactcagctgcaaaaaggaatgaggcatggacaggtgctgcaatgtgctgcagaagggcaggtttcactccatttctacaaaacactcagaacaggcaaatccacaggacagaatgcagaggggcagttgccaagggctacgggaggggatggggagaggctgctaatgagtacaggatctccttctgggatgatgaaagtgttctagaacttgacacagatgatggttgcacaatattctcaatgtactgaataccactgaatcgcaccctttgaatcaattaatagttcatgttatgttatgtacaattttacctcattaaaaaaaaatgggcccctctctgactcttctgctcccaggtgagttctgagttttgtcctctctacctcaactccagcagcagcttcctaaaaggcttccagtctatcatccaccacactcccaccacagtcagctccccagaatcaagctcatcaggtctagctctccctccctgcaggcagagctcgcaggactgtgccagctagggccacgccctcagcctcaagccccatgccccagccactctgagctctcttgctgcacttacataagccatgctatgatggtttaaatatgtctcctgaagttcacgtgttgaaaacttattcctgccacaggatgttgagaagtggggcctaacaaaggtaatgaggtcatgagagtctgccctcatgaatagattaatgtagttattgtgggagtgggttcattatcacgagggtgggtttgttataaaagtgagttcagctccctcttgctcatgctcttttgcccttccactttccaccgtgggaggatgcagacctgcaccagatgccagggccatgttcttggccttcccaacctctagaagcaaggaccaagtaaatgtctatcatttacaaattacccagtctgtagtattctattacagcaacacagaatggactaaaacagtgtctttttttttaaacctccatgcctttgctctgtgtgcagttccatgctcaccagttcttgccagaaaacttctgtgcatgcttcaaaacccactcaaaagcctttccactgggcccccaaagtgtttgttctgcctcactgcaaaggatgcataaactgtaacctatctgtctcctccatgaaacggcaagctccccaagggggttgttgggggtacacattacattcatctgggatcctgaggacccagcgtgatgactaacacatcctttcatttcacaaataccactgaaggcccaggattcaatgaggaatgaataaaagatggtgagtcatgagaactcagcccatgaggacctctggctgtcacagagaaatattctcttctcattcacattctttctgttctgcttctgaataccaccacccaagtcttccattctccctgggacagtgagttgaacagctgggaaggaggaggaagatggagagattgcatctccaaccatttccgccttctttgaactccaacagcatttgtaggtggaactataccattttaacaattatagactacatcttatcctttctatgccttgtgaagtgtccccagccctgctgagcacagggtctcggcacactgcccatttccccatggtgagcatcacttactgcagtgggttgaacagtggacgcccagaactcagatatacccagaacctcagaaatgaccttattcggaaacagggtctgcacagatgtcatttgtcaaagctcttgaaacgaaattgtcctggatttaggatgggcctccaatccaatgactggcatgtttataagaaaaagatggggatttggacagagacacagaggagaaggccatgtgacacagaggtagaggctggagggatgcagacacaggctgaggaacgccatgggtggccagcaacccccagaaggtgcaaggggcaagggaagttcttcctcaaagcctccagaaggaaccagtcctgccaacgggcaccttgatttctcacttctggcctccagaattgtgagagattacatttctgttgttctaagccacctagattttggtaatttgttctggtagccctagaaaattaacctgctaacaaactgtacaatttatggatgtgttcagtgtctgcctctctctctagaacacaagttctatgagggtaggtatttctatctctatccatcaatgagtaccaagctcctaagacagtgccccgcaaatagtacgtggccaacaaacactcatgagatgcatgaacgatgtaacgataagatgcacaggctgcctgagcctgactcccagctctgccaccaaggcactaatggtgtgaccttgggcaagttctctaacactgctggactgcagatttctcttctgtagggtggaaagaatgattaaaaagaaaagtcatggagcattacatggattcaatgcttaggaaggcatagacggtgtcttacgcacagttagccctcaacgttagatgttagaaatgaagtcactcaagaataaattaacagtggctctcaactgggggcaagtgttgctccccaggggacatgagacaaatgcctggagacattattggttgttactacttagtggagggattgctactgcctccagtagacagaagttagggatcctgctcagtgtcctacagcccaaaacatcactagtgctgaggttgagaagtcctgatataaagtaaaattggtttctggagagaaagaagcaagacgtaaagatgaaataaagtcccagatacggaattataaaactggggaaatgactacacacacgtctatctttccaacccattagctgccatattgaaagctcacacagagcgtctccagcccagacacagcggttatctgacatttacttcttctgggacactctcagcccaagcccattccaaggtggaggagagaaagcaagagaagcctctttgagcatcgttcgattgccctgttgccactgccacctccaccaccatcgccactgccactgccacctccaccaccattgccactgacacctccaccaccatcgccactgccacctccaccgccatcgccactgccacctccaccgactttgccactgccacctccaccgccatcgccactgccatcgccaccgccactgccaccgccacctccaccaccatcgccactgccacctccaccgccatcgccactgccaccgccatcgccactgccacctccactgccatcgccactgccactgccatcgccactgccacctccaccatcgccactgccacctccaccaccatcaccactgacacatccaccaccatcgccactgccaccgccacctccaccaccatcgccacctccaccgccatcgccaccgccagtgccaccgccacctccaccaccatcgccaccgccacttccactgccattgccactgccaccgccatcgccactgccacctccaccgccatcaccactgccacctccactgccatcgccactgccactgccatcgccactgccacctccaccatcgccactgccacctccaccaccatcaccactgacacctccaccaccatcgccactgccaccgccacctccaccaccatcgccacctccaccgccatcgccaccgccactgccaccgccacctccaccaccatcgccaccgccacctccactgccattgccactgccactgccatcaccactgccacctccaccgccactgccacctccaccgccatcaccactgccacctctaccgccatcaccactgccactgccacctccaccaccatctccactgccactgccacctccaccgccatcaccactgccaccaccaccattgccactgccacctccccatcgccactgccactgccaccaccatcgccatcaccactgccaccaccaccaccattgccactgccacctccccaccatcgccactgccacctccaccaccatcgccactgccactgccacctccaccaccattggtagcagccgtgacagctttcctagggctgctctgcaaaaacaaactcctcctgggcttaaccgtaagcccttggcaaccaccaatgatggggaacttgactgctgctttgctggacccagaccaggaaatccagatgggaagacgcaggagtgcaccagctcctcgtgctctgtggcgaggcctctgcgaaacgggcgcacatcaggaaatgttcgctctcccttcaccaccaaggagactggccgatttcctctccttcaagcttcttccaacggacagagaaaattcccagaaagacgttgggggaaatgttagcgacagcccggagaagaggggaatgtttacgtggacgggcctttgtgcctgcccaaggtgccgtccatcaataccgccaacttggggaggatgcccatcaaggcggagcagggacacagaggtgtcacgtgcacctcggcccacagaggaaggatgcccagtacatctgtcggggcggcccgaggacaggcgacagattcccccgcagacatctgcctgctggaggaacgtgccgtgatgcagacgccggggggaggcaaggagaagggaggaagggaggcaactctttttatagcaagtgagcaaacaaacaaactgttttgccttaagaagccaaaaaggaaaaaagaaaaagaaggagaatacatttctgccactgctgggagcatcgtaagagccaccttggttgaccacagaaagaagtgcagggtgccaggcacactgaggccagggccttccctccgcggccccgaggacagctgagaacaggccagccccagccgctcagatgccagcaacgtgctggcacagtgctcgccctgttgtgaatgagtcctcagtccctgcagaagctcagtgaagtcggatggtcactaacccgatttgacaggtgaagagggtgaggctcggcaagttagcaagtggggaaccacgaggtggccccagctctgagcccccacctgccacactgccatggggacccaagggtctcccgtttatgagctcagccttccgaaggcgaggtggaagtgaaggactgcaaaccccgagttaaaccctctgacttctctccacctccctcgtgtcttcctcctctggccctcagaccctcgagccgatgaaacgcaccacgaccttggcttcccgaggcggcctcccctcaccccgacacgggagctgacattgtgcattccattcagagctccctttgttcaggccacatagaaaccagagctgctcgtcagagaaaagctccatcccataataaacagcatgaactatttataatcccgaaaacatctttattattatttttcttccctccagaaacaatctcacgcaatcctgttaagtacacaccacggaggactggagggccacgggtcggggctgcttcccctggccctgcccagcgaacagatggcagcgtgggcgttaggtaccagcctcctggcaatctgaacatctgttcccgttagaaaatgctaattgccatcaatcaggacagcacctacccacatttacatgcaagcacacatgcacaaaaaaaaaaaaaatacatctaaatttctccaagtgcaacactccctgcatgttaactagcctaagctttgcctcagcctcggaggagcagccccgtggccagcttctggcctggagggctcccgtcggggcctgccctggacccacagcaagcagtgaggttagggagtcactcggcaggtagccatgcttcagcccccggtggcctctcatccgcccagcagggagtaggcacgggatcgcggcctgggcagtgcaggccgcctggacagaatccctccctagcctggatgtttctctctacgcctccacaaagccactcctccggctccatctgtcctcgatgtctgcacccattcccctctccctgagcaaagcttctgggcatccccacggcccccaggaacaacccagctggatctcccagcccagaggtcgtctccatatccacatccaagggctggcccatgaggctccctctgcccaaagtgcatgtgtggagacacctggcagctccaagccaaggtcccagacccggcctctgctgggctgtgttttctaccccgtggggctggggacaagatctctccagcatgtcaggtgggactgggccccagcggcctcctccctcctctagcctggaagccctaggcttgtgaggccccgcaccctctcccggattgttctctggttgagcatcacaaagccacaggccttggtgatcaggaagagtcctggggggcggggggcgagcacaggcagtggaagggaagcaaagctgccccagataggtgggtgacccaggatggagaagggcagcacctgcgagtgtttgccccttggggagtcgagggcagaacctccctccttccttgcctggctttctgcagagcccctgccctccccaaggagcacagacccaggctactccctgggaccttgggagggtcacctgcagcccttctggagaccacagggaccaataacatgccacagtgacctcaggccatgcatgcccattggaggaccctctgcatttttagaaagtgagctggaaacattggcctattatataatgaaagtcccacacacacacaccctccccaagagaaagcgattttgctaatttttctcccgggcggcaggcgccgttgccagccttggttgctatggggcccagtgactggtttgagtggtaaactcaggggattggaggagaggtttccatggggagccacagagtgcagccgatgagaggccacaggtctccccacctagggcagcccacacgaccaggtgtgaagagggcctcctggacccagacctggcaggtgaccccataacaggcatgagccatctccatgacatcataacagggtctcttaatggggacatccctgtctgtgaaccaggtacaggcttcctctgtgcacatgcatgacacatgccatatgcatgcactgcacacgtctagataaggtgcagagctggcactgccacgggcatgtgttatggcctcatcgagatggctcaggactgcggtggcatcacctgccaggtctgggtccgggaggccctcctcacacctggtggcacgggctgctgcagacggggggtcctagggtctctcaccagccacaccgtgctgcttcccatggaaacctctcctctgatgcttgagagaggctgatgtgtggcttaggtccccagagtagcgtgccttcctcagagatttcaggggatgagtgataaataaagaagtgggtggagatgagggcagagcggggaggagggagagaaggtggaaaaactcaaagaaccttgcttccaaatttcttttacattttgccttcttttaagatgatccctctcttggtaccaggtaaactcatgtggatgttgaggacatgaggccacctgatgtcccgggggcatgtcccagctgtgcacctgtggccagcactcctgggccaccccctgctctgcctgcctgacagagaggcttaccgccaccagcagctctgctcctgagctgcctaactgcagatggtggggggcagcacctgttccgtggggcttagggcctccggcttccatccatgagtgccagcgtccctggaacgtgtgccccacctgcctcctgccaggatccaggagtgggcacctctcctccctgggatcactatggtctttgttcagaatcacagtgtttctctctgctatgggcctttgagtcctcccaggaagggaccttgagcaaggcctccgggaagttggcctcctcctctgcttgccccctcccaccacgccctctgaccctctgatttctctgtggctcctgagcatggcctgtctccctgcaaggtgccacaggtatgagaacccaggagacggttcttctccaacacccgaggcagacgtcatgcctcctccctgcctctcacttcccactttgcagctttactgtccgcattgtttggttcgctgagccctaggagctgagagactggttaaccatgagggactgtggagccaggaaacatgactttgaccatttgcccttcccaccctgaaccccacacgctaagaccaaaggaggatgaagtttccaaaatcaacttcacaataatgatagaaattaatgagttccacacagataggcagatagacaggggatgacgcatgaataaatggatacctgcatagatggataatagatagatgagtagatggataggcagatggatatagagacatacagatagacaggcaggtagacaggtgacagatgatggatggatgcatagacagatgatggatggatggacaggtaggtagacagatacatagatggatgattgaacagacagacaatagatcaacaaatgaatggatagacgggtacacacatggatgatagatagatgcatacacagacataggtagatagatcggtagcagataggcaggcaggcaggcagacagacaggaggatggatgaatgaatgaatggatggatggatggatagatagatagcagataggcaggcagatagacagaaggatggatggatgaatggatggatggatagatagataggagacaggcagacagataggaggatagacgaatggatgcatagatagatagcagataggcaggcagatagacaggaggatggatggatggatagatagatagataggaagatagatggcagatagacaggaagacaggcaggaggatggatggatggatggatggatagatagacagcagataggcaggcagatagacaggaggatggatagatagataggaagatagatggcagataggcaggcagatagagacgggaggatggatggatggatggatggatggatggatggatggatggatggatggatagcagataggcaggcaggcagacaggaggatggatggatggatagatagatagactgattgattgactgatcgactgacagactgacagatagatagatagatggatacagatagatatggatatagctcctctatagaggagaaaatgtagggaaaaaacccctatattttcccctacaccttctcctttatgggtcattcagaaaggtcggtccaggtcttgacatcgagttggcagcagaggagccaaggactcaagccagatgaattctcactggtcacgaggtgtctgacatgtatgctgggcgggctcaagtccaggtctgtgcccatctccctgcagcagcactggggccccttggccgcccatgcagtcctgggaatccaggcaccagggaccagacctgacctgaaacagggatgtgtgtggagaggaccccactccacgtcagggcgcctggtcctgcctaacgctccagcctggacaactgccctgtgcctacattccctgtgccgtccctgtcccctgtcctgcaggtaagcagctgaccacctgctcgcacctcacatctccctatggcacatgccccaccccaccaccctttaggtgccacaatgagcctgccagaccagactccctccctccacccacagctgcacacaactggatgtgggaccccaaaaaacaggtttggcctccctcattccaccaggatggggtgatctgagctaagagagggaaggacctctagttaaatgtaatggggagggcagcttgctcacgtgcagtcagaagaacacgcatgaaggagagcgctcatgagggagagctcgcatgggggagcacgtgcacggaggagagggtgcacaggggagaacgtgcacaagggagaacgtgcatgatggagaacgtgcatgagagagagcacgcatggagatggaagaccatctcatcgtctccagcccatagctcctcaccctaaaacacatccctggcagtgtgctccaaggagtgaccaagagccagggtgagggtcgtaggcacgtgtggggcctcctgcagaccacaggtgccttggaggagaggctgtcatgggtcatctttgtgtcatccttacgttcagctccacacacacagcccctggccccgatccagacccaaaagggccctgcgaatgttggagaatgaatagttgtgtgcttcaatatcacctgaactcaggagatcactactggagacaccaccgcagccccagtggcccacatgtgtgtacctgggacatcatcctggccccggtggccaaaatgccgtgtgtccactctgctggacagaggggaaagagtaaagactgtcaacagcaaataagacaggctggcgggtgggctagggctggacggagggctgtcttcactcaacagctccccccgaggctactggctccccatgtgaaatgtcgccacattataagcagagtctcataaaatttcacaggaaggtggcattaaaattcttctactccaaaccacccctcagcacacacatgcatctaaggttagaatcccttccccaacatcctaccacgtgcttctcaagctagggaacccccctcagcccccaagggtgtgcagaggtgagatgagggtggctggccacacagcccacgcatgtgcctcctctcaaagtatccgttctagccaaagtgtctgggggaactattactgtcaggttatagccagcacaagcatattgtggattcaatgtaagatgtgcttgaagttttaagagaacaaataagacttcaaagaaatgtcatcctttctctggaccccttctggcaacacacgcccagtccctcaggggtacaggtttaatatttcctctcttctggagtcttccggggaaaatgtatacctccagggaaatgctgtgtgcctctctgtcatccaagacaggccacttaatctccctttgcctgagcacagcccactgcacgcatgttctagctctgtgatgcaccaccacgaaaaaaataacagcagaaccagcccttcctttctattcactgaaggagaaaaaacagaattaactgcttcatagacagtcaaaataagctttctgctggcctcagtgacaatgcttgacatccataatgcagaatggaggtgagtcctgggtccccagcacccctcctgctggaagaggccaggacacacgaagggtctctcatgggaagcagccatcgtggctctcagctcatggaaagcggggtacgtgaccagcactggccagggtgcgacgcttggggtattcgcagggaaatgagggcaaagcattttgcaaagagcgtgcagggccgggcaaaatactaaataattcaaaaatcatgatgaccttgccttgggaacttttggagcaacagaatggtttagaataatgacccatccaatgacattctggctcacagacaagagacaatattcaaacgccacctctggtcacccctggcctgagggacatttgttttggtggctgaggcagccgccagttacccagtactgtgggtacaggcgtgagctttctcagctacaaagagcacgacataaacaaggaaggcgcacacacacctgtcacctctccgtggactgcagtgtttaaaagacagtcatcacccaaagtgctttttataacaagaaaggactctgaacgttgtcaggtgagtagcactgcctgtgtccccatggccagggcgtgtgcagagcctgggtggacgcaggcaggttagctatcccagccctatgcatcactcctgcatcacacctagcgccccgtgtgtgacccgggatcccaccgttctccagggtcgagggagaacacttcaagagaggcgactaaatctccaccaagcacattatatcaaatacgcctcaggaaaaccctttatggaaacctactatgtgcagcactgtgggagaaacaagttgcagcctgtgcccttaaggaactccagaaagaaaaggggacaggtgacaagagacatgaccaaagaggcagctccatgcacagatgacgacgaccgcccagctgccctctgcaggtgtgcaggaccagagggcaggaaggtggggtgggggtgggctctgggtcatgcccacttggcctccatcccagagagcagctcccccaaacctggaatgatgagtgtgcctgacggggcccatctgagatagaccacagtggtcgtactagctggtggcagagggttgggagtggtagtccttaaattattttgaaataatttaagaatcacaggaagttgcaaaaatagtacagaaaattcccgtgcacccttctattatggactgaatcatgccctctcaaaattcatacattgaagtcctaacccctagtacgttagatgtgaccgtatttggagataggacccttaccaggccatatgggtgggcctcatccactctgaccagtgtccttctaagagaagaagattaggacacagacatgcacagatcaaggggcggccatgtgaggacataaggagaagatgaccatctacaagccaaagagaagccttcaaggaaaccaatgctgccaacagcttgatcttagacttctggcctcttgaattttgagaaaattaacctctgttgtgtgagcccccaggctgaggggcttcaccatggcagcccaagccgaccacacacctcccacatctcatgaccaccctccattctcaagcgaggacactgccctgggtctgttggtcagtggcagagcttattcaaacgtgacaagttctgtgatctgacctgtgtggcctctataccggcacttctcaaaccatctgtggtgaaggattcattggtttatttccaattcattctggacctacatttttgtttctttgttttgttttttgagacagggtctcactatgctgcccagctgatctcaaacaccagggctcaaccaatcctcccacctcagcctcctgagtagttgaagtgacaagcccttacttttggtttttagaaaacctataaaaatagaatcactagaaaaatggaataaagaaggcatacaaaacacaaagcccaggttcttaacgattagactcatcagacctaaaacgactccttcaaatgactaaaagattctaaatgcttaatttcagcttctgtactcagttgcagggatcaggagcagcacctcacgggctggcacccatccacagacctcactttgagtagctgagatatgggtcatgtgagacgtgtcctcagcctgttgctagggagctgctgtgggtttgaattctgtatggccctgggttggtcatttatctgcagctcagcttcctcacagagcccgagttggaactgttgtgaggattcacgatgattcatatatattttgggacgagaacctcgggtaagataacctgctcacatgtgtcattcagggacgtcagcctgatggatttccaggccttgcatactgttctggacactccaggcacacagatgcctcccacaagaagttgtgttacgagtgtattatttgatctttgttgaacttgggtttatctttgcttgctttcaggccctcccataatgttgacatcctgatgaacccccgctggtgacggcaggtggccacaccctgcaagctccctgtaattccagccattactcagcaatgctcagcaatgcaaggtcactcagaaacaccatctgtccaagctccatctcccctcccaccccaaaggaaaaaagaaaaattattctgttccgcctccatttttctcctcctcctaaaagcacacacacacactcacacacacacacacgcagaactaaagttaggcttgccttgacctctacttctaaattaattttccttcctcaggcatttgctgacgctccttttctgttctttcccccacagaacacagatgtctttgaaagcaccaatcctgcaaacactttgtatatccttgcaaatcgggtaaaagaataattttctccaaatctatacaaatcctcactcgtccattcacctttgccatggaattcaccggcaaccccctctgaggaatgcacgtgtcaatgcagaaaaaaaaaaaaatgaagaaattccggaatcacatcgaggggcctcagccccaggtcccatctaagaatgaggccagcaagaaccacttaggctcttggatgccgttgactcacgtccctggtggcccttgatcattttgaatctaaaacatatggatttatacagattcatgtggaaccttctcatgtttctccatccagaatatctctgtgacgatgcagtcacaagttctgcagttacttctgtgtgacagggtctgtttggatcatgcttgcacaggtgtcgatataccatcctggaacacgaggactaaccctcctttccctcaacggatggtgacaatcatttattggctctcactgaagacacagcccttatcgctgggggactcagcatctcagaggaggatgggctgtgcatgcagagggaacacagggagcaaagtctgtgcagaaggtcacctcactcacatttgacttttgtatccgtgaacttcagtgcagcgtgtacccaggatctattttctgcttccattccccctcattccctggtgccattagttccttttcctaaagtcctcatgggtctcccccagccctggactcttacctccaccatcaccacctgactcagtccctgctgcccgcccactggcctgcctcaccaccagagccccacgcatcactaacttcagcacccgtgcccacccaaaaatgtgtccacatccctctctccccagaggtctctttttccctctgtttcttgggcctgactcctacctttccttccaattcattccttccacacctcaagagccccctggagagacctcacaggctcccctctcctggcccagctctacaacgcctccctctcccacaggcagagcaagactccagtttctctctcctgtgacaaaagtgtgcgcccaaaacttgcagcacgaactgtttatttttaggtttagatttggggtctggcttttaattcttagtttgttctcaagtccgatctcagcagtgggaggtgggaagtgggtgggggacagagaatgatctcagctcatcgttccaggtgcctccctctccactaggtctgtggacggccttctgacctggggtcctggggttcttccaatgtccactcttacagctccagtcattctggccttggttttaccgctcagcctgcataccttcttatcattgtcttaaaatcagccaagggatggttcttttccagagcatctcagtgtctgggtgagatcagggccgagggtcaggggacacctcaggatgagtcgtgggctgtagagtcatagtgcctgggttcatcttcctccctggcagccttggaggatacagtgggtggaatcatgtccccccaaaacatgttccagccctaacccccaggacctgggaatgtggccttagttggaaataaggtctttgcagatgtgatgaaggtaagaggtgggccccgatccaatgactggtgtccttagaagaggaggggaatgagaacacacaggtgcacacacatgcatgcgtgcacacatgtacacacacaaatgcacacacacacaggaaggtcgtgcgcgacaggatacacaggcatgggggtggggttgcctcatgatgatggaggcagagactggactgacagtgcatctataagccaaggcccacagaggatggccagtggcccccagagccaggagaaaggcctccgtgtgtgggacagtttctccctgagaagcaaccccgctgccctcctgattttggatcctggcctccaggaattggtgagaacgaagagctatcgtgagaagccacccagtctgtggcattctgtgatggcagtcacgggacaccgacccagatgatctgaatttccagccccactggccaggctgactgtcctgggggctgcacctgacaccctgtgctctgggggccactgacaccctgaggaccaggccctgctggctcctctccttggattatttccatctggggagcagcggcagggccctcccttcccgctccagcgctggaactacatctggaagctcttctcacccttaattgttcttaatgctttaacacacggagtgactaatgggctctaattgggagcggtgtcctggggaactcgcccacagcgccctctgcgacccgcccagtctcctccgctgctcactcacagagctctaaagtcaccaaggaaaaatattggcccgtttttctatttttttaaaaaatgtcacaccagtgccaaaaagcagttttatccttcagccaacaagtatagggcaaagaaaaggatagaggcaaagccaaaagcagatgggacaaaatatcacaaatgccactgaggtctgtgacatctgtctagagacaaagagttcttggaggcaaaccccacgccagtcagttcagggcgtgtgaaggattccagccacatgtttccccttgaaggggaaaggaaagaggggataaggcatctctgatgtcttctcatctcctctccgacccctgtgaggggtaagtggtgactgccaagtcaccagaactgcagagaaggaaccagatgatagagaggataggcagaggcagggtggcagaattagggggtctggaaaagaaagtgcagaaaagcctgaagtgcacacaattcctcagtggggtggcggggacagagagagacagacagagacagagaaggaggaagaggagggggaatgagaaaggaaagaagtagggggagagaaaaaagaagaaagaggagaaagaggaaaaggagacggaagaggaagaagaagaaaaggaggaggaggaaggtgctcaccctgtaaccccagcactttgggaggcctaggtgggtggatcacttgaggtcaggagttcgagaccagcctggccaacagggtgaaaccccgtctctactaaaaatacaaaaattagccaggcgtggtggtgggcgcctgtaatcccagttactcgggaagctgaggcaggagaatctcttaaacccaggaggtagaggttgcagtgagctgagatcgcgccactgcactccagcctgggtgaaagagcaaggctccgtttcaaaaaaaaataaataaagataaattaaaaaaaaaaaaaaaaaaagagggcgcggtggctcacacctgtaatcccagcactttgggaggccaaggcaggtggatcacgaggtcaggagatcgagatcatcctggctaacacggtgaaaccccgtctctactaaaaatacaaaacattagccagacgtggtggcgggcgcctgtagtcccagctacttgggaggctgaggcaggagaatggcgtgaacccgggaggcggagtttgcagtgagctgagatcgccccatcgcactccagcctgggcgacagagcgaaactccgtcaccggaaaaaaaaaaagaggaggaggagtaggaaaaaagggtgaaacagaagcaatggagtggggccccaggtccttgtctcatgtcctctttctcacagggacatcctcagagcttgctctggtggtgaacaagcaaaggggcagggtggcagaattaggcaggatcagaatgagggactgaagtggctgagcctggcatccttcctaaatattttccaaatacatttcttaatagaaaaggaatcacagaagtttttaggacccaagtctccaaagactggctcaaactaaagtcttctcattaaaatattggatccaagaaggaaataagatgcccctgtaggaaggagagaccccagcaacgtccttcagctgggcaccgcctgttccacccaggagcacctaggacgagctcctgcaaaaggaatgcattcactgcaagcctgggagcaacgtcccatccgcttctggtataactaaatgaagccatgatccccctctccccgctgccaagcaacgctcatgtgctccaggaagccccacgcacgttcccacggctcatgcgggcagcctgtgtctcggctcagccctcaagggtgccatgctccccgtgtgatggattccagtttaacagcttttaaaaacaagcagacaagagacgggcgtgatggatgagtgcaggaagcacgctcatttggagatgatttatgggaagtcatgtgttgccgctcatgggtgcgtccctgagggtgggggccggggtggatggatgagtttggatagtgtaagctgcactaccacggcaggctcacactcagccccatggcgtgtgcggcagctcccgctcccatctcatcacggcaggctcacactcagccccatggcatgcgcggcagcacccgctcccatctcatgctgtctgcatcagggcagaagactttgtttatctctcagctccagaacaaagatgctcccccatccccaaaaacatctagagaagagacaaccggccacattccttggctcctctgtgtgaccccaacaacgaacagcaatgtggtttaggaaaattcaggttatcccatgagagtggtgaaggggaggggaaaggaagggaagggtcagggttggaggagcagatgaccctcctctggagtttttgctcaggcccatctcttccctgtggacctgaaagacccatctgctccaggcctcagccactgcatgtaacagacaaatctcgttttgcagcatccatgtttttaataaggacttagaatttactatacagtaaaacccaaattgaatccatagttaaagggatgagctttaaaacgggatctaattgacaggaccctttccgaggcagaggcaatgaaccagggctgaggcaatgtcctaggaggaaactgcttcctccccacactctcctttgaagcaaggactcgcctgcagtgatggggagtctcggtcgaagggctccttgccaaggccattcctgaatcagaaaggccagcccgcctcactggggcaaaagctcctgcaggcttttccctgcccgggtttctccatcactgttctccaagtccctcttaggaagccccttcctctagtcacattcctttgggccatggacggcatccacatgccagagctctggtagcccaaggggtggttttggcggccccttctctgaagcccatgtccaggctgcagggagaacccaggagctcgcggggcaggagggtgtctacaggcacacctgacctcagatgtgtgtacatggccctcttccttcagacacccgccatccaccatcctgaaggtgaataaaagacaggcagagattcaaagccacacgcaggcctcagactgcattgctccttgctctgaggggcttcctctcagaggggcttccttctctccccttgacctcacccttttagaaaaggaagactctgaaaggcagattcctcacttcacaattcagagcacacctttggaatcaacaaggggctggacagtgaacacaccgagggaagcagctcaggtccaaaagagcttgtggggtgaccccaccaaccctggacttcccagacgctccctcgggggtgggctggtcttgtactttcactgttgatgaccccgaggatttacctatttgggggacacaggttctcagacccacagaaaggtgaggctgggccccgcaacctccttcttggaggcagcaggaagtggcattttcagaggagcatgggagatggtgctaccgtcacggcctgcaggatgtctgtacgtcagggccctcccctagggacagagctgcacgcatcttcttggaactaggcgtctgaggttccagagacagagcatgatctcagggggtctctcgtcctgcactgaggccagccccaaacctcgtgccctatactcattttctcagacagcctgcaagcacagtgatcttggcacagagcgacctgaccaggagccgtagtggatggcacaccagtgctgccttcacagcgacactgcagggagccccaggacagaaagagccagaaagagcagtgggattcctgccctctaaacagtcacattgctgcttctctgtcccatacaggctggggtgtgtggccttcctatctgggctccccgagggggcccctgatggtttacggaatggggtgacagccgtttcagcagaggaggggagttgtttaagggtttatctcagacatgggcccagatccaccactcctctcctcccgggtccatggcagagccagtgctcccagggatagagtgcgacagtgggctcgctcgtcagctgtcccttgcttccactctgtccccctcacagaaggcagagacacctttgtatgtctcaggccattcaatccctcactcagagccctgcagtggctcccaccacccttaagacaaaatccaaagtcctcagtcccaacctaaaggcctctgcatccagccctggaccctcttcgtcatctccttcctccacctgcacagcccccggaccccgtgatgccagcccctcctgctacttctccagcatgcccacacgttgctgcctcggcgccttggcactggccattccctctgtctggaacactctcccctcagacatcctggggtcctccctcccttccttctgtcttggctcacaacatcagcaccggggcctgcccttctgtcctgggcaactgcagcccccaccattccccgtggtcttaatgcactgcatttatcttcacagcgttatggcgcctgacatacatttattcgccatgtccctgctaaaatataaacaccatgagggccagaacttgaccttgtctccactgcgtctccagcaccccaaacagggctcagcacatcgggggctcaaggttgtggaatgaacaatgtagggcagtctggatggatgagctacggcaagaagaccccaaggagccctggagcagagaagagcacccatggccttcaccagagagaagcaagcagtgcacgcctggagaagcacccagactgtgcatagagacttccaattctgcaaactctggaaagagcatcttttgatgggtattggagagaccagcctgtgtccgggcctctggtctctttgtccagggttctcgtcggcatcatctgctcagcctacagtgggtcatcatgcaaagcctgcctgcaggcttcagggctccagtcctccctgcctgggggtcgctgacccacagctttgcattgtctatcagcagggaatggggctgcactgaacctcatgggggtttaagaaagaattcacctggtgtctgtccctggttcctgggaggtgatctctaaaactgctggggtttccaagggataggagtgtcttctgttattcataaaaagccactcctgaccacacctgaccgtgtgctgacctggcaactcacagggacccgtaggaagcttcaagtgtgaggctggccgtgcacgtgattagagggttggaaatttcactccccacctcaggggagcagagagggctagagacagctcagtcacgtggctcggggagcttgcggttggtgaacttgtgggtgaaccagcagggtggtgcatcctaacaccatggggaatgggtgtggatgctccgaactcaacctgtgtgtatcatacgactgtcatacaactgtcatttttagtgtagtgcttttttgttgctgtcgttctgtgaactgtagcaaattatcaaaactgaggggtcctgggaacctctgaatttgccactggtcacaagtgcaggtgaccctggcagcttgcattcgaagtgagagccatcttacagagcacttggcccaaaccctgtggagtctgacgctgactccggcggttagtgtcagagctgaacggcagtcaccctctcggggtgggaacagaggcatcatgccgtcccctctagagccacaggaaggcttcagggccctccctgagccgcggagcaatctgggcagcagaacacgaaccgtgcaggggagggtcaggccctgactttggactctatggcatctttgttgacaccagacagtggaccccacaccccgcccaccctccttccaggactaactgccccgcagccaggctgatgggcttcgaggtacaaagagcggtcactccttaaaaattctaccccataccttcttgggcgtccgtcgatgttccccctcctactccacaaagacaccatgacttgaaagctatagagagcagcacagaacgcccctaccccacaacccttgctggaaaatcaaatcaccgcattaaaacgtatttcctccacaaatgcaaactctggggatgggcatggcggacaggtggggccgccttacctggtagtgggaggtgaggtctgctttgctgagcggggaggccccagtggggctccttctggaccgtccttggcaaggagggggctgctggggaggagtggcgaccacaggaagactgttagcttctcagaggcagaatttcaacctgcagggggaaaaaagcaagtaaaaaaattgcctttgaagaaaacatcttccttttgatctaaaacaaacatttggtattaataaaccagggagggggcagcttcaaagccaactgtttgccaccagggatcgagggattgagggatcagcaccctccaaagggcactttgctttttatgccccaggggagtaaaaggaaacttgcagaaaacacatcattaggaccctattgccaaacagccaccgtgcagtccatcccagggtccgcccctctcccagcccgcttgcaatggtcccccaatcccagggactcttccaccccaccacgctggcccctccccatcgcctttcccactaccgcccgctcttgcttcctcccccacccagcctagattccaggacccaccactgtccgcactctcccagctactttgtccctctcttttaaaaatattcatcagatgatgtcactgtcctgatctggtgacacagccttccactggtgtcctgtgtcatttggaagaaacacttaaagttgcttcagtggcctgcaagccaggtgaatctggcttctgtgatttggggacttcctaagaaaataacatacgaggtctcacatgggggccgtgcgctcatagacagcttcacggtcaaccccctttgcctttggggctctcggcagtctggctccctctcctagtatactccctctctcccctgcagccccactggcttcctggccatccctccacacaggcgcatgcctccccgaccccacccctgcaccacacctttgcaggtctactgcatggaatgctcttccctgcacaattgcaggcctccctccctccctccctccctgcctgcctgcctacctgcctcggagctgtgcacatatggcacctttccaaggccatccaggagcagaacaccccatcaaaataaccagcatccctatggcatttccttctccttttccccacgaatttccccccagggacttagcacatctggcttcatgcggatgtgctggatcccgccatcccactttgcctccactggaatgcaggctccctgagggcaggcatccacaacggctggatttagtgctgaatccccagtgcccaggatgtgcctggcacatagctggggctcactccgtattcttctgagtggataagtaaatgaatgaatgaatgaacccacaaaagttactcccccattaatacttctgggtttatttagaatcatatcccacgatcacaccggagagcaggaattcccgggatatggaggggactgaaggattctgtttgtttagttggtgagggctggcagggggtagacccaagcctgggaagtcttgtttgcttaatttactccaacccaaacagtgtatgtgtgccatcagccagacaggacacaaaaacggtttaggagatccactctgattagcctgagagactgtctctgggacagagtcatgagatcagggtggccagggagtggctgagctgtgtctccctgaatcccccccaccactggcaccacccagaaatttcacaacggagttttaaacagcaacacacaacaataataaatctaccagtttgtttcttttcctaaaatccagtcactggacagagtaccacccccataccgaagaaccgaagagcagaaccagcatcacagagagcccagcaaccccggagcaatgcctggggaacatctgccctttcagggaccattggtacagagcccagtgcccactgctgggtgtgggagccactcttcaatggcaaaagtgtaagtaataggaacagttccatggatgaaatgcagccagggaggtggctgggagagggcctgggtgcagggggcctgggtgcaggggcctgggtgcagggggcctgggtgcagggggcctgggtgcaggggcctgggtgcagggggcctgggtgcagggggcctgggtgcaggggcctgggtgcagggggcctgtgcagaggtagaggactcaggtggaggtggaaggcagcccaggttgggtaggaaggggctccaggaaggggctggcctggtggggagagaaagcaggcggcaggcttctctgcgacctaagtgcttgattctcagcaggagcacaaaaggcaagggctagaactcacactgcaccaggccctgggcagggaagtccatggggaactgaagatctgcacctagcctcctctgagcctgctgtccacacccccacagccccagcttccagctgttccaatgaccggagaagcagaagtttctgtaagccctcaagtctcccctggtccccttggggctttcagggagataataggatacacttctggtcctggaggcgattcccaagcatttgctttaactctcaatatcacctcctccccagacagggctcccagagccaggatggaggcaggtggtccagggagactcctgccccgctgctctctcccaccagccccaaagcagaggctgcccagggcctgggcgagaggagagcctggggagaggcgggctgtctgccggggctctcacccttcctgacttgtcagttctcttgcctttgaggcggatggagccctccttcccagagcagtcctggcaggggaggcgcccacaggaaggaatggaaacagagtccatccctggggatcccaagtcatcccctggggccacatggacacccatgctgcccagcctggcagccagtccagggccagggaacataaacccttgaaggagagggggaggaattagagggagcaaagacagggtcgggagatgtgatgaaagaacccaagagaagctccaaccccactgctcccctccccagcacagaaatctttaagtgtcatgcctgaaacccaggccgccttctctaggtgctgctcttgctcctcccccatccagcctagattccacatccccccagaggctgagctgaaggcggtgcccccagcagccccacacttctccaccacaccttgcaagccaagctcacaggagattatttcattttcattttaactggtcctacccagccctgtctgcagccgccggcttagaagatggagacacgagcgatccacaggccgccgagtccggagggcagggatcagcctcagggcagccacccctgcctgcgctcgagcctccttggcgccccgcacccctcctctgccgccggctaggcgaaggcgctgcatcctagccccaccgataggcccagcctggttttgttttgacccgagctgagtgggagataacttaacagcttgtccccgattgtaatggcatgtttttccccactccgcagtgggaaacaccatccatcatccatagcgcagaacacgggcctatggccccctccgcgtgcgctcctgtaccccacgccccaccccttggtgctgcggggtttaggggacctcagggctcgccccaggcttgtggctggcagaaggagtggaaccacggtgggaggcaaaaggcccagtgaccaagtacccttgacggctctctaggccccgcagcccggcagggttgggagcgtagttgggggctgggctgggctgcaggtggcttctcagggcgcagtggcagggaccagggtgggcggggcctggtcgaggccacagcctaccattcccccacttcctggggacaaaagggtccagtctgtctcgggagtgagctgtgtcctcctcattctccgacctgtatttattgcccctcaccatgcgctgagtgcagtgctcagagcacagcagagcacacagggacaccccactgttgaccttcaaggggaaaagcccctgcagcctcctcaactccccttcttctgggaggtcagttggggaattctgagatcccatcctgtcccctacacacacatatgcgtgcacatatgctcacatatgcacacgagcacagacgggccatcctggaccctaccctccacctgcttcctcaggatctaatcctcttgctttaatgacagggcccccaaataataaaggagtccagggagaggcttaagcatccccagaaggctggctatgggtggcagggcccccagaagagctgggaagcatgaggagtgtcctacaaagggtgagggctgtgccctggggcttggaggggggcctcagtctcagagaaggattttaaagactcctgtgcccgcatctgcagctggccagtttcctcttcgcagctctcagcctggctgcttcaacctgctgcagaaccagccagcactgctcccgaggcagcacgagactggggcagcccctggtgctctggccccaaaaggtctcctctcagattcttgtcattggaaagagaagatagaaaaacaaacatctggactgctataaagtgtcctctatcaaaaaataagcagatacacaaagggagagggaggtagcagaaggagtgagagagaccgagggagggaagaggagggaaggaagcctctggggatgaggcatgttcacccagcctggacaggggaagattgaggagggccatggcagaggtgtgggtgaggcacacaaggtagctggagcagaagccacaggcagatagcccaggtgagatgcactggccaggcagagaggaggctaggatggcaggccctgggcaagggcagagaaggcagaagtcagatgacctgccctggctggccccgacgaccttggactcacgagttgcctttggtcagaagcgtggacttgtgttgacaaagatgctgcagaggccgggtggcggggaggccagaagcaagggacacgcacagctaggaaagaatgtgctgagatgggggagaggagagcctggccgaatcaccatcatcatcctcgtcctcagccccccgtcagtgtttgctcactatcgtgccccagcgcctggccaatgctggcacacagtaggcgctcagcagttttggtgaaatgaatgctgcaaagaaggaagtcaatctgggtgagtggcatggagctgggtaatgtttctgatgaaaattccagcactttgggacgctgaggtgggtggatcacgaggtcaggagtttgagaccatcctggctagcactgtgaaaccctgtctttactaaaaatacaaaaaattagccaggtgtggtggcaggcgcctgtagtcccagctgcttggagaggctgaggcaggagaatggtgtgaacccaggaggcggagcttgcagtgagccgagatcgctccactgcactccagcctgggtgacagagcaagaccccatctcagaaaaaaaaaaaaaaaaattcctgggtgacctgaacaccaacaaatgggatcaagaagttgtcactgatttgcatctgacgacgggatggtcttcaggctcctagaggtgggggtgaggtggaatgaacttcccattctacatggcaaagcaaatgaactcagcccacctaaaacacaggcaccccaagaccctcacactcacagcctcctgtgcagagagaggacaaacagccaagcatacatcctggatttttttccgcacatctccaaatagaaggccacacttggacttcagcatgcaaggacaggctggggacatcaccagtcccttataaattaaggctcatctgaggacatggcttcatttataggatttaagatgaggcatcacagagaggcagaagtggccggtgagttgaggcggagccccccatttcactaccccctccccggggcctactgacagcagcacatgggggaatgagacaatggtccccctctgggcagatgcagccttgccagtgcaggacttgaattctgaggctgttcgtcttctcagagcatgctacactccattctctgcaacagcctgattggcatgccttggaacattccaggccatggcaagggaaaagcttggagcaggacccgcaggcctgggttctcctcccagcccatcactgtgtgacctgggacatctgaacatccctgatcctttccgcatcaactcacaggaagtgtctactatgtggcagatgcagacccaggttccggacattcaacaaggtacactagcaaccccatccctgcccaaagtgtcttggatgtcaccttccctgccccctgtatgaggcacacagaaagaagacagaaagggctttgcactaaatcacagctgcgctttctcctaatactccgaggagtcaaatgacctctgaaggccaccagagccacaggcctctttgtgatggtcacacatgggcttgtgaaagagccatttagggacatagcataggggactctgagaccaggggctccaaaggaaggaccctaaaatcaccagaaatcaagtttgggtttttatagcattttgcttatcttttgttttgttttgttttgttttttaacaaagatagcaatatcaccagaaatatgcttgcattcttatttggcttcctggagggactcagaaaatggcatttgcaaaatctcagaggactccactcgcacattttagattttacttttctccccaaactacgcctttgctggttcattttattgcagagagcggaacattttagccttctagtcctgccagaaagttaaaaaaaaaaaaaaaaaaaaaagaatcagagtaatggcaaggatttaacattcttcatttattttattttttgagacagggtctcactctgtcacccaggctggagtgcagtaacttgaacacagctcactgcagcctccaccgcccaggctcaagcaatcctcctgcctcagtcccccaagtagctgggactacaggtgtgcgccaccatgcctggctaatttttgcattttttgtagagatgggctttcaccatggtgcccaacctggtctcggactcctgagctcaagcgatccacccaccttggcctcccagagtgctgggattacaggtgtgaggcactgcacctggtccaacattcatttttttaaaaccatggaattctccaaaggtactagagctgtgcaccctcccaactgcagcatttcctcagggtatgcagccctctggagcttgcccggggtgcagttcctcaaggcactgttctctttccttctgtttttcttacactagcttctccctgggtgccagtggttctacttctgccatcttttctggttaatccctctcatacctttcagggctgctggctttgctctcttccattttccatcaccccaattcctcctcagcctctgtaccccgcaaaacataagctcctaaccaaaatcagagtttaaaataggactcaaactaagaaagcaaaatttgctctttctttaaccaagagaaaaacaacacagagcacctcattttagtagtaaagattatagggaatatacaatattcagaataaatgaacctcctccccctgtttttaaaccactcttgtgaaaccagcttaattcctggctcccctcatgccttctgaatcctgtctctggcaaaaataatttgggttttattcttctggcatctggtgggagtcggtgacaattttactgtagctatacttcttcttttttaataccagtgtgttttaataatacagtgtaccttttggtattgttgaaatgttacattattcaacgtatccaacgggaaagggaaaggccttttgtaatttatgtgtcctcagtgctgtgtttaaagcttgcaaagtggagggctgtaatttgggaagcaattttccccaaggtcgggagaatggtttctggaggagaggctggagactgcctgacccgggttcagtggggctgggggcccagaaccctggccatgaggctgatcctagtggtagggagtaccgtgggctcaaaatcagaaatgttccccaaaatacagcaacaacaacaaatcctcagcctggctatggctggcttgctgggccacttgggtttcaagcaactcatttagtttccagtttctggcccttccagagagcatcactgctgtgctaaacatccatgagtccctcctgcatggatactggggcacagctgggaacaccacaggcacctgttgaggggcctgcagtgtagagagagagagagagagagagagaacaggtaaaccacaaccccagaggcagggtatgggctcctacaagatggcaagctctagaaggttggggccttatttttctcagcaccacagctaagccatcgagaatggtgcctggcacaccccaggtgctaagcaaacatgcttgagtgagtgcatgaaagagtgaagagccaatagagagacatgggtgacgggtgtctaggaacctaagcagaggtactgcattcatgggaggtgttctggcttcctagggcaggtgaccaaccctggagtgaatcggagaggagaggggaggggaggaaaggagaggggaggggaggggaggggaggcgaggggaggcgaggggaggggaggggaggagaggggaggggaggggaggggaagggaggggaggggaggggaggggaggggaggggaggggaggagaggggaggggaggagagaggagggcaggtgcagagccttggacagaaggggtaggggaaatgtcatctagggaatgcaaataatagaggaagtttaggactaggggtagcaggagatgagaccagacatataagttagaaaccagatcaggaagtaccttgaacaccatgccaaggactttaaaaagccatttgaggaattttaagtaggacatgatgaagatttgggtattcggaagcacgctctggtgccgatgtgggctgggtagaggggaaaaaccaaggcaggaatctcagtagggaggtggcccaggtgatccaatggcctacggaagggcggatggagttagtgactgtgaacaccaggactcggtgaccagtcccacccacatgggagatgaggaagacgcaagccacctcccgggtttcgggtttgtccaactacataaatagggggccagtttgtgataaggtgaggaggaagaagttgggcttgggagaccaggacatcaggaaattgcagtgcaggggccttcagcttggtgatggtgtcatttatcgcattattacccacagtctactctgctattccttacaccttttcctatgttaaaaatggcacaaggccgggcatggtggttcatacctgtaatcccagcactttgggaggccaaggtgggcagatcacttgaggtcaggagttcaagaccagcctggccaacatggtgaaaccctgtctctactaaaaaactacaaaaattagtcaagtatggtggtgcatacctgaaatcccagctactcgagaggcaggagaattgcatgaacctgggaggtggaaattgcggtgagccaagatcatgccattgcactccagcctggatgacagagcaagactctgtctcaaaaacaaaacaaaaaagaaatggcacagtatgatgtttcaaggccgatggggctgagctcacactggacatgctgagtttgaagagcccctggaatgtcggggaggagggttggtcagtggtggtgctagcatccaagctggagagaatcctgcctgcactggggactgtggcagtccaggctctaagacagcccctgtgtcttcacctcctggtgcccagacaccccctggtgtcacctcccctgtcataccagcactggtctgtgtgaccaatagaattcagcagaagtgaaggttcatcaattctaagattaggtcttaaaagagctccatctttctctcactctggaggaagtcagccgccctgtcatgaggacactcaggcagccctacagagaggccacctggagaggaactggggccacagccagcagccacgagagagaccagcttacaagcagatcctccagccccagttgagccttcccatgcctgcggccccggccaacatatcaacgcaacctcgaagggacgctgagccaggcactcagctgagcccctcccagattcctgaacctcagaaaccatgagctaataaatgattgttgtctaaagccattaaatttggggataatctattacacagcaatagataacatagggattacaaaaaaatatgaatggtggctggagccacaggcatggagaagaacgcgaagtgagaagacaggatgagagcagattacagaggtgaggaaggtcacactgggacacgccaggaggcagtggtgggagagaaaggcccgtgaggagggaggaggaagagccctcaaaaggaggaagacaaggctgagaaacacaacaaaatcccaaggatgagaggtctattaggctgttcttgcattgctatacagagatgcctgaggctgggtcatttatcaagagaagaggtttaattggctcctggttctgcaggctgtacaggaagcaccgtgttggcatctgctcctggtgaggtctcaggaagcttccactcatggtggaagctgaagagggaggaggcgtatcacacggcaagaggggagatgagggaggcaccacactcttttaaacaaccagatctcacatgaactaattgagggacaactcactcatcaccaagggggtggtactaagccatccatgagggatccgcccccatgatccaatcacctcccaccaggccccacctctaacactggcaaatgatttcaacacgagagttggagggggacacacatccaaaccgtatcaagagcatttccagaaggagagcgtcagatgctacaaaggcacagcaggaccccggcttcccagggaccaagttctccccctaccctgtctcagtccagaccttcttacctgccacctccctgcctggctgctggccccatcacatctctcagatcccactcccagggtcttcggtcttcaatgagaggccttccctgaccacccatgctaaaggagtccccaaccccagtttcccggtcactctgtcatagctgcctggcatttgttgcaagttgtaattatattttcatttgtttctgtctcagccatgacctatgaaggctgggaaatatctgtttcattcactaccataaaccaagtgcatgatatatcctagtttctctatatttgttggataaatggatggaaagaaagaaagataaaaaccctgagtttcacctggaggcccagttcaactggtggaaaaaccacttccctccccaagtcacacacccgccgcggcagtagggctccttggctctggaggaaaacatagctgggctgggggaggaggtggagaaggacaggagactctgaagttgacccagaccagctcttccatcattctaaaagtggggaagctggatacggtggtgcatgcctgtaatcccagctacttaggaggctgaggcaggaggatcacttgagctgaggagtttgaggctagcctgggcaacatagcaagaccccatctcatatctcataaataaataaatagtaattaaaatgagggcttctttaggaattccaagtggccaccgtatttccttcaagcattcaacaaacatcaacaggctgaggctgtacaactgggctaggtggtgggaacctgtcccctcagcagttcagagtcttggtggggaagctggcagccaggcagggcaggagaagatgcagtgtaaggggtgaggcctgaaggctgactgtccccctccacccttcctccccgagctgtgaggccctgggcaagtagcataacgtcttaaacttccacagcttgcctgtaagcaggactgctcccaccgcacaggctggcaccccctcttgttcctcaccaacaaagcacttgggcctgggccagagcataggtccacattgccatgatttcaactggtaattacaatacactgcagagaagacacacagagcactgtggacacagggagggttggagtgggctggggaatgagcagctttctgaaggaggtaacagtggaggcttgaaggagcgggaggcgtggagcagagaagcagctcagagacataaaccctcccatgcccaggcaaggaggccagagggcctgaacagctgagggcttcagcagcaggacccaggctggaagtgaggcccgtcaaggactgaacccaaccctgcctacagaggagtatctgtggccagcggcacagtcaccaacaccagcatccggtccagggccacagcctgagatagccacacccaacagaggcacaagaggacccacgcaggagccatgcagagctggaggtcgatgattttcatctgaacagggagctgggccccgaggaggacttggaaccacccaagtctgccccatctttgggggtggctgtctgtccacgcagtggccatctgggatatggagggtggcacgtttgccacagttcaggttcatccccatgcgtgcttccccaggtgttgtgccccgttaagggtcgaagccccctcctcacagcccatcctgtttcccggtcccctcgaggatctccacaggtgagttacctggcttacgtcgggtgggaggtgaagagaggaactttctagttgcttttctccagcttggaagtgaggccttggagaagcctcctgaaggggggaagggagggacggctggcacgggtcgtgaacaccatgggggaagcagagaagggcggggagttggggggtgcagggggcttccgggggacaagggaggggcactagtgtagaagccacgatggggtggggtacaagggcacaaggaggtaggaagggggaacagggggtggaggtgtggggagagggagaggggactgggacaggggtgcaaaaaggcaagaaggtgggggaggggtgcagagggtggggaggtgggggaggggtgcagagggtggggaggtgggggcaggggtactgggggcagggatggggatgtgggaaggtgggggaggggtacagagggtggggaggtgggggaaagggtactggggcagggatgggggtgcaggaaggtgggaatggaatgcatgggacaggcacaggtacataaaggtggttgggggcacaggggtgcagatggagggaggtgggggagagggtatgacagggtagggcacggggcaggggaggggtgcagacatccacagtctgggtgcaggtgtagggtggcagaaggtggttgggggtgtaggcggtggacggggtggaggttaaggcagaggcccctgtgggcagggaccctgcaggccgggaccctgcaggcctccagcctcggcacagcctgagcagtggcagcgtggcagatgggaacgtgcagaaacatgcagaagcatggcccctggttaataagattaggatgttgaacggccgacatgttctccgagactggctgtatgccacaaatggaggggactgcgaccttaatagaatgctgaacttttggaaagtggagcaaaatggagagagtcagagttggggactgagagtccccctctcgggctggaggccagggctactggtgacctgagggcttccgggagttcagagtggggcattttcacttctggatcctaaaagccggtgggcctggatgggactcattccttggcgtcctgttacagcaacaggaatgaccagcgctcctaaaggccccccacctggccctgagacctccatctctgcccacggtctggctgcatctcctggaaggttttgttttttaatgctcctgtcctggggctcttcctctctctaggcctagcacacacttccagcctgggcatcagggaaataactcaaaaccataacacgctttaaaaaatacactagccagcaactgcaacaacatttgctttgcacaaacatttcaagagaattccccagatagtcttgctgtgggggaattctagccaccaggagaaagctgcccaggccctggcggggcttggcttcccagcggtccctggccaccttgaggacaggaggcaaacagggacagacagcagcagaggggtttgaggccacaacagcatacagaatttcctggcaggatgtgtcattagagctctcctagagacggcccttaccccaccctttccttgacagcctaggacacagtgatgcccacctctgagcctcccatgcgttatcttaggtgttcacgagattgtcacgtgaatgccgaaagcctgcctgcctcccacggagctgggagctcttgaggacaatgtctgccacgtagcagggcatggaaatcttcctgagtgatttgggtgttacctgtgtggagccgatgacctttcacggtccttgcctgcctcgggacccctgttctgtcaggctgtccccatgctatccctcccagccagcccatcacctcaaagaagcggggctgtcatgagcctgcactggctgaggccatcatgagagccctcctaaggtggaagcggaagtcctgggtccaccccctgcatggcagcccccacccaggtgcactgccactcctccccctggccccatgactcaaggaactttcctgggagctgggaaagctgggaaatatctcaatttaggtcatggctataatggtacagatatttgtcaaaactcactggaccatactaagacctacgcatttcatagtatgtaaattaccctcagttttttaatttaaaaaagttaactcctggaccgaaaacagatttgagcaaaagccactgcctcagacccctaaggcttccaatggaccgcagagtcttttattcagccaaagtcagccaatggagcccaagcaatacgtttgggaaaaaaagcaatcatcaatgtaatgataaggaaagtgtctcatacgtagtactaggagacctgcctcggtgagtttctaccagcagtggcaggaaggccagaagccaccggtgtccacacaaagcctggctctttcctcatcagttctctggcagtgaggagagggcaggagtaaacacgaagctctagaacaatgtcctcttcccagccccccagctggctgcctgggtaaggtgccaggtagggatggacattacatacacaaggctggtggtactgaggggccatctctgaaggtgtgcaccttacagcaacacagatgggcacggccaaagctgctcccctcccctctggagccaatggccaccccagcagggactaagccaaagcttagagtctgcccaagacctccccaggttaagagaggctactgcaggactccaggagcttccccactccctctgacagcaacaaggccctggccttggaccagacccctagaagagcagatgttaggcagatgtgcaggaggctccagaaggttatggtgggaacagctgtgggtgctgaggagcagacaaaagcagacaggagaggagcagaatggagatttacctctttggcaagaggctcttctgaccaccgcttgccctgccttttggctgagaacacagactgaggcctggcagagagaaggccttgctatgtaagcccaggttgactcagggccagttttggccttcagtatgctctccctcagggatcccgccatgacatctgccttcataggaactcgttttccttttgcgctcctttgggcagcattcttacaatccaacagaagaattctggctcttgtggagcttcatgaagggggaagacctcccaaaaccagtatggctcaacaaagcgccacctgcccactcatccatccacccatctacatacctacccaaccactcacccatccatctactcacacagccatccttccacccacccatccatctacccattcactcatccatccatccatccataagcctacccatccatccactcatccatccactcactcacccatccatccacttacccatccgtctactcatgcacctatccttccccccaccccatctacccattcgcccatccatccatgcatctatccatccatccatccataagcctacccatccatccactcatccatccactcactcacccatccatccacttacccatccacctactcatgcagccatccttccacccaccccatctacccattcagccatccagccatccatctgcctacccatccatacactcatccatccactcacccacccttccatccacttacccatccatccactcatgcacccatccttccacccaccacatctacccattcgctcatccatccatccatccatccatccatccatccatccatatggctacccatccatccactcatccatccactcacccacccatgcatccactcatgcactcatccttccacctacccatccacttactcatatgtccactcatatacccatccatccactcataccctcatctacccatccatccatccacattcctacccatccatgtactcactcatccatctactcactcatctatccacttatccatccatccatccacccacccatccattcactcatccacccacccacccatccatctacccattcactcatctattcatccaatcatacatatacctactcatatatccattcatccatccattcacatatccattcacctgcccatccaaccacccacccatctaccatccatttattcatccactattcattcatgcactcatccatccacgcatccaaccttccatccatctatatattcatccatccatccatccatccactattcattcattcactcatccatccatgcatccaaccttccatccatctatatattcatccatccatccatctacccactcacccatccaccatccattcattcatccacaaagaaaccccaatgagagggggtgagaaggcccacaacaggggcagggtttggaggtcagtactacaaagcctgaaatgtgaggtacctacaagtctgggcttgggtatcagataatcctggatcaaaatcctggctcccttgtcactatcttcgggcaagttacttaacctttctcaacttcagtttaatcacctataaaatggggcaataataactttctcattgggttaccataagaaacagatgagaccgtgtatccagaatgcttgctctggtggcaggtacatagttagcatttgatatacagtggtggccattatccgcatcatcatcagaattggccaccctccacaccaacaaaagagtatgcattaatggggctctctattctttcctacttcatgccctttgccatgcgattttgcagtttttcctgcaaaagaggtggagcctccttccctaccctctatgaatctgggcctgccgtgggacttgttcagaatgaggtggaagagatggtgagccatttccaagcctaggcgagaagaagccttgtatgtttccacttgttctgtcattgccatggttggctccctggtcccaggacggggatgaaagatccatagagcacagctgccccagctagaccaagccaggagcagggcaactgaatcaacccacagacccataagggagaccagccagggtcagccaactcccaacgacacagacttgtgaaccataaagagaaatgacttttttttttttttttttttttttgagatggagtttcactcttgttgcccaggctggagtgcaagggtgcaatctcggctcactgcaacctccgcctccggggttcaagtaattctcctgcctcagcctcctgagtagctgggattacaggcatgcaccaccacgcctggctaattttgcatttttagtagagacagggtttctccatgttggccaggctggtctcgaactcctgacctcaggtgatcctcccgccttggcctcccaaagtgctgggattagaggcatgagccaccatgcccagtcattgattgttgttttaagcaatgggttttcatagtttgtcgtgcagtaatagctaactggtataccttcccccttcaatttccccatcccccttctccttttcccgtatcaaaagacattgattatgaaacgtctagttctgtctcccttacaaaccagaaaaggaaagacttctgcaagagatcctgtgaagcctcaacttccctgcctgcagcccctgcctgttccctggaaacaggaagtgacagtgaagcccaggaagaatgacgttgagggcaggtgggccaggcttggagatgcagacacccgtgctagggacacgtttgcttgtgtgcctgtctacttaagtacttttaattcaaggtaacccaattttcagcatctccagggagtgggctctcagacgtgggaagtatgagaatttgctgtggaaatcactgccgaggggagattagggcttccgtgaagggtgcggagctctttcctgcaagaccattagggattccgcacagcgcacgtggcgtaaatcacttcctattcaggcctgctgatgaggggctcaaaggtcgattttccatggttatgacaacaaaaactaaaattgggtcaaacccgaaagctattatcttcctccgagccgctaaatgctcaagagtaatgaggttggttgagcaatacgctccagcctgcttgcaggctgcggggaagacagacaggcccattcactgggcgggctcagccgccctgccacacctccacatgtccagcggaaggtcccagacccttcatctcgctggccagagaggctggttgtctgcagccctcaggcccttcttcctgcctgtaaaagcctcacagctaccaaagaagagatgtccaacagctccaggaaacctgagtcactggggttggtgggggaggccacttttgttcccgagtcccaccctctgcctcctccttgtcattatgacagccacaggtttgaacctgcaagagccgaggggctaaggatttgttccagctgggcccctccctctgaggaatcctggcctctcactgtggcagacgccatgccaatacctggaatttgcataatgtgcccttctccttatacattattgatttgcattccatgcacacacatgccccgcctggaacccatccttcaaagcctcactgtcaataggcttcaaattagacccatcatctcagtttatacagtatttaacaactgacctgtcccacaacttggagttattcttagaaactgccctgccttatctcaagagaaagagaagagggaaaacgggggagatatttaaagccagaagtatccctccagaattgattttgttctctaaattatgtgacagccatttattaaaatggtggatggggcatgttggcaaagctggggacacgctggcagcacccggccagggtgaagtggacagatcctggagaaatatctgagaaccctggtcattgccacactcacaggccacgtgaccactaagcaggtcccactgagccttgatataagcctcaatgtgctcatctgaaaaatggggctaatataacctatttacagggtctggagagagtggagtgagattagttaaatgaaagggctttgaaaacattaaactatattctgatacatgagtgaaccttgaaaacattaggctaaatgaaataagccagacacaaaaggactaatactccactcatgggaagaacctagaatagccaaattcatagagaaggaaaatagggtggtggggtgccagggatggcagggagggggaaggggagttggtgtttaatggagacagtttccatggggaaaaatgacaaagttctacagatggaaggtggtgatggccacaccacaaggtgtgttcacttaatgtcactgaacgggccactttaaaatcatcaagatggtaaattttatgttatgcatattttaccacagtaaaaaatgtaatgtttcaccatgatacaactgtgcagtgatgtgatgtcagttcctgtgtctttcaggaacatttatctcatgcccccagcctggaactggaaccctgcttgggcagagggagcagctccaatcttgcctttgaactggagaaaaacggggttccattccttgctgttgcctcttcggcctttaccacgactcactcatgccgtggaaaagcatggattctgttcctcggcacagatccagagtttgagagaggaggcccggcctccccactccctgtccacggggttccagcaggcttgcaaggagggggaccctgccgccaccaccctggccaacctcctccagcctttcacagagaaccctttcaaagtcctgtcccgatcagctcaggaccccataacaatatcacagactggggaccttaaacaagagacaggtatttcccacagttctgcaggctgggagtccgagatcagggagcagcgtggtcgggttttgtggagggcttttccgtgcttacagacagatgcctgttccctgcatcctcatgtggaagagagaggggagagaacaggctccctggtgtctcctgctataagggcactgatcccatcacaacggccccacctcctgacctcacttgaccctgatcacctcacaaggctttgtctacagataccattccacaggggcttaggggttcaccatatgcatggggcgcccaattcaggcagcagacccttcagattagatctgcagcaaacaagccagtctccctctgccccggagctggcacagccacccaaaagcgtctgctaacacatgggattttacatgttctaggagccatattttaaaaaattgaaaacaagcaaaagtaattttcatgatatgtgtatttaacgtaatatattcacactattatcattttgacatgtaatcaatacagggactatcaatgggagattgctcatcctctgcctcgcacgtggtctttggtaccccatgtgtgttttagacactcggccagcctgtctccacccaaactcccacatctccagctccacggctgcgtgtggctcggggctgccacactgcacggtgcaggtgagggatccctccgtgtcctgcagccccacaaccaagggacatggggccccactatggttgtaggggtccactgggaggggaagagaagccggttcccaggagctgattgtcttctgcccggctctcctacacaggctctaaagccacagctcctccacaccagccaccatctgaaggagggtgtttgcctgatggaatccagaggggtgcagagctcacaggggctcctggaccaggacggggatgcaaaacccttcctcccgacttagactccagcggagcttgtgcacacccaccttccagactccagtcaaggaaatgggaaggtgggtgggcggggtggcagggtgctccaggtggcagggtgctccaggtggcagggtgctccaggtggcagggtgctcacctcgagctcctgagcaccgtcccctgagagagttcctgtgaccaaagacatcacctgcttaggcagagggagcagccaccccaatcagggcttgcccacatgcaaccgttcagtcgcgtaagcgtttgtgacattggcatgtaccccaatcaaaacctggcatagcaggagccgccgtaacaaagccgttggcagcagatatttaaaactcctagcttctccctcgccgagtcagagatcggccatgggacgcttccctcccacccagagtagctcgctcactagcaatgtggcacatttctttacaacacagcattagtttcctcctgttcctgcaacaaatgaccacaaatagagtcgctcaaagcaacagaagcttcttctctcactgagggagaccagatgtccaaagccagttccctagttgaagtcaagatgtgagcatggccgagctccctccagaggctccaggagagaagcgttgcctgcctcttccagcctctggggctgcagcaactctctggcttgtggctgcatcgctccagtctctgcttctgtggtcacatggccttctcttttgtctgtgtcaaatctccttctgcctctcctttataaggacattggtgattacatttagggcccgcctggataatccagcaccatctccccagctcaagatccttcacttcatcacacctacaaagtctgcctttgacatataaagtaacatccatcggctctgcagattagggcatgactatcttttgggggcccttattcagccaaccacagatatgcactaaaaacatatacagatgcggacgtgcgtgagggatgagatggtgagatgagatcggttcactccctggtgatgaggcctggtgatgtggccatttgccacaagaaaatggttcttggggagattctagcattgcctagtgagagctggcacccaataaggtaaagcacccactggccggccagctgctctgagcatccccaaagctcaggcatctgaggcccagggcaggcagagaagttcacaaggagatgccacccagaagctgcttaagtggaacagtgggaggattagactctggcaccacaaaggaactctatcagctattagcaccaccatcatgatcgcttcagaagaggatctacagaagaccccgcccaggcccaccacacccccgctttaaacatttcagtgtacgcagccccatcccactgccagcacctgcctggggtccagagtacccctggagcagcctcagtccacgaacaacagaggtgggtgtataaataccccagctccctctcccctgggctggagacccctaagctgtgtgtcctacacttgccttcagggtccccagtgggattcagcttcacttgcccgcagcagaccctgggctgcctctcttccctgtcccacctccccagctcctcttctgtctccttcacctcccccagtgcttgcccttagatactgatggcggagtctgcttctgggaaaagccaaactgagacatgggcactgtcagagcaccaaggaggtaccaccaccagctcaggaatgggagcaaaagcagaggtgtatgagcctggaggtgtctgggatgaaggtcaaaggggaagtgaagaggtagctggtgagacagtgctgcactgctctgatggtccccacaccgcacgcctctaagggcagacattttgaccatgatattgatctctatcgctgctattaagtgcttgatgctgtaaacactaggcacgatgctgaatgcatagcctgcatatttcactgaatccaggcaaccaaggtggggtctggcatggcccctatgttatagctgaggaagcaaaggctaagagcataactggcccaaggtcacagccctcctaagtggctacaggtggattcaagcctggacgcctcccccttcccttactcccatatgcaccaaacacatagatgcttatggcaaacgttttaaagttcccaggctaagaataacagagaagtaagcgtttgaggaagagtaagggaaagccagaagagagatgaggaaattgataccacatccctgtggaccttgcttcgcaaagggaatgcccccggacatctccacttctagactttcctccatcagagccagaaaagggaggagggagtgccaggaggagggtccagaaggggtggggagggacttgagggggccagtttcctgcctggcttggctgtgtggctcttcttgagaagcagcaaaggtacacggactcggctcatccttggctcccacgatcactgcatcacgcatggggaaattcaaggcgatgccgagcggccatctgtctgttgtggggagctgggccagaggctgcgctgggtgacctccacactcccagccccctcttagattctaaatattgtcagatgtcccaagaggagtgctccagtggccccctaccttcctgcagcactgccccgggccacagagcctctcaggccatgaccggggagctggaccccagatggcgaggaaagagccaaggaagccaattgccgcggccaggcctggggactggagtgctgagcgggccagccccttcaccctgttctgtttgtcagaggttggaagctggggccaaggtgggctcagtgagtctggatgggagacaggaccaaagcaccgaggagaaacgaatcaggatgggggccgcagaggagcggcggccgcttccggcagaacatggaatcctgacgcagcccagctgggaagctggaacccttctccagtgcccccacgatccagaggatgggaagttctagagacaaagcctctaacccagtcaccacaggaggcctgcgcagatgtggcctaggatgggtactctgggttgttgcgggctggcaagcatctgcctgagaaatcgggatccaccctcaggaggcagctggagcccgttggtggaatctgatgctgcctgggagccctgggggcaggagagcggaggagcctggccggagggcctggtggtgatggcagacccccgggggaggctggagacacagccccattctccacaccctgcagcagaccaagcggtgctccatcccgcctgcttcttatcagacaccactgggtacctctgccatcccatcagacacaaccgccagggcctcagagcactggctgcgcccacaccacctgccactcaggtgttttaaatggggcagtcaccccctgaagacccctgtctcctctcagcagtataggcctaagcagggcccgagacttataattctgaggttggagggcctaaatttggcgtccatgggggcgccacaatggggctcctgcttggcagtccccgccccacatgtcaggtgcccgcgggatgctgggtgggttctcgtcaactccattctcagccccagggtggagacggggaagggtgggcagtcctactcccctgccattgtccagtccatatcccaggtcaaaagagattcagaagaaacagaagccctcccctctcctcagacaagagcccccatgtcagacaagccacagctggtactgccactcagagacattggccacatcttgcatcctcaggagatgtccatgaggtctcttcactgataatgagacccttctagaagtttccagagacttctctaatgaccaccccaaagggagagtctcctctctcctttacaggtgagagaaccaaggcacgcaccaatgaggttgcacagagcaggccaggaaaacccaccctggggaagctgagccttcctgggcctgggcagcccatcacagtgacagggccagtgagggggccacacactccagcatctgccaccagaatccttcaccagacagcttttctctagctcttcccaccaaagacctgaatggggcttaggaacatggatgctgttgaggacacaagtcagggtctggcccgtggatttaggagcctcaatgggaccgatttgtaaactgcctggtaacatggaaaacaccagcagactccagaggccacggtgaaaccggggcagaaaggaaatccctgcatgaaaatgacggcagcccctgcgctcgctggccttctagaaaagcccacccggtgggccgctgggaagagcaggtgccatggaggccagcgtcagctccccgagagggggttcctccagcacaggggccttccggagggaggcttagtggctggtgacccagtgctgccaccccagccacattgctccctggaggtttgccaacattgggggcgtcctgagccgccagcccagcccgacctcctccgcctgcctgcccgaggctgggccgccgcccaccgcctccctgaccgcccgaggccgcccactgcctcccttgttgttattcttctcagtgcctccctcctctctctgctccccgcacccccacaggcctctgcagcaccgcgctggctcggccgaagctgactggagttttaatgactcatctggggttggggtgggcgctccggccccaggtccacctgctggatccttgccagccagcgtcctctgccccagcaagggaagcttcgggctgtgcacagccccctcgctgggagatttggagagcccacccggtataccgtgcacaccccacactccgcacaccccacacaccccgcacaccccacacacctgctgctgccagcacagccatgtgtccccagggcagagggctgaggcgggcggcaggcgtccatgcgaggtgcccctggctgcatccctcggcttctacagggcacaccaaagccaaggacttcttgcatcacagattttaaaacttctcctgcagcctcagaccacacccccagtccacatcaggctctcaacctcacctgcaggtcagaaacacctggggggcttggagcctgacccacgtccgggccccccgaaggctgacgaagtcagagcccagggcaggcagacactagtattgtaacagcgttccagctggttctttggccggtctgaatgacccagccccagggccccggccctggggtctaaatcaaccactgcccccatgaggttgtggagggatccgggcaaggggctgcagagccgggacacagcaggaggacagcggggtccccaaggcggcctggtcgataggagcgccagagccggtgtttcagcgtgggtggctgtctctctctaggacgctggagctacggaggctacacaaacggacaagaagagaagggccctggtcctccccacaccccctccagccccagagcacatagctcagcaaagccaggggcccaggctcccactctgcgggtatatttgttcactgtgacctcacctgcaggtccagaaacacttggggagcttggaaactgaccgatgctcaggccgacggagtctgagtccagggcaggcaggcacttgtatcgtaacagcgttctagctggttctccggctggtctaaatggccataccattccccaccccaacccctccttcccttatactaacggttccatggcagggtcggcgcctgggagagctatgaggcctcagggacccgtcccttcctttccctccgtcatccatcagccgtcgcaccccaggccctcggtgacagctggggtagagcccagggttagggtgagggctgggagctccgggctgtgcatggagggagaagccaggagcccagggccttgccctgtgcttccatggactcaaggactctccacccctccctgagcctcagcttccccagttgccaagagcaggcactgcactatgtcatcagcaaagatccttccaatcctacttacttgggcatgacgcctgggagaggaggcacaaccaaatattttctaatatgcacatattaccttcataacccaagaaaaatcaattttacaacaggagtcaatgcagaaggagcatccacagcattacctctggtcctcaagtggcggcgtgaatggcctcacgcaactctgccaacagcccggcccacccaccagaagttggccctgcaggtcagcagccaagtctcctgcagtggacgggtggtggaattgtctggtgtcgacagaggtgccacggaaaagccaccagcccttcccatcggcaacaagttccatcctcccggccaggccccgggactctcggctccctgtaaccagcaagccctgtcccgccaagcccccactttaaatactttgtacctgacccgctgcgcacccaccgccaggtctgacaagcacgcaggacacgacaaggggccaaggcaagctgcccctgctgctggcacccagccaccctaccctcagacgacacactcatttctgtgcaccctcagccgcaccaaatcccataaccttcatgttcggggccacagggagaggggcaccgtgcctgcgcagcccctccatcccaggcatccattaacattccccgtgtaaagttggggctgtaattacagcaagtgattaacaggcctgaggtagcctgtctgggagggagcagattaacagcagagcttgggaatgcctgcgctcacctcagaaccaccagtgcatcttaaacagggcccagcgcccctacgagcgggtgattaatggaggggatgaggacggaggacgtttccctggcatccgtcaccaaactttttcctttgggcgcctcccttgctggccaggcacagtggagggcaggggagggcagccaggactcggggcgagcacctggggcttccaccaggggcctcgctctaccttcccctgggccaaagtgtacccccaagcagcagcatcctagggagaaggagagggagatggaagcaaagcccacagggccgaatgcatcccaggagccaagaacctcggcctcctttgtccaaatagaaaatctgaggctgccccccagaacctcctccagccccaggcaacattcagggctgtgctaacagggaaaggctctgccaggactgtcctcatccacgcaggggcaccaaggtcaagcagaacaactgcttggctggcagagggctcacgggagcctccacctgggctgtgtcctcctgagggtcagggaagaaacgggaagggactctccctgggccaggaggtgtttgcagggttgtgatgtccagatatccgcttagacgaaactctgtgtgtgtgcagtgtcgtggggtgtcatgcagtatgacatgttacctatgcatttaggttttaaactacccccttttcagtgcctaatatgtgtcggggctggggacacaaagacagtttagggatgatcgtcctgcccatgaggctcttggtcttgcagaggaggagtcgtggaaatgggataattgctggagggctctgtgagcaagagctgcacagcaaaagcaaaggggatgcagcagttctgcccgtgtggggtgagggcagcagcaggaagggcttaatagaggaggtaaccctgcagtgaaccgtgatgtcaggtgagaatttatctgtcaggcaacatgggccagatgcatgttaccatctagcacagccccatggccaggggacacccacccggatacatgttaccatcgggtacagccccatgaccaggggacgcacacccggatacatgttaccatcgggtacagccccatggccaggggacacacacccagatacatgttaccatcgggtacagccccatggccaggagacacacatccggatacacgttaccatcgggtacagccccatggccaggggacacacgtgcagatacatattaccatcgggtacagccccatggccaggggacacccacccggatacgtgttaccatcggatacagccccatggccaggggacacccacccggatacatgttaccatcgggtacagccccatagccaggggacgcacacctggatacatgttaccatcgagtacagtcctatagccaggggatatacacccggatacatattaccatcgagtacagccccatggccaggggacacccacccagatacatgttaccattgggtacagccccatggccaggggacacccacccggatacatgttaccatcggatatagccccatggccaggggacgcacacccggatacatgttaccatcgagtacagtcctatagccaggggatatacacccggatacatattaccatcgggtacagccccatggccagggaacacccacccggatacgtgttaccatcggatacagccccatggccaggggacacccacccggatacatgttaccatcgggtacagccccatagccaggggacgcacacctggatacatgttaccatcgagtacagtcctatagccaggggatatacacccggatacatattaccatcgagtacagccccatggccaggggacacccacccagatacatgttaccatcgggtacagccccatggccaggggacacccacccagatacatgttaccatcgggtacagccccatggccaggggacgcacacccggatacatgttaccatcgggtacggccccatggccaggggacacccacccggatacgtgttaccatcgggtacagccccatggccaagggacacccacccggatacgtgttaccatcgggtacggccccatggccaggggacacccacccggatacgtgttaccatcgggtacggccccatggccaggggacgcacacccggatacgtgttaccatcggctacggccccatggccaggggacgcacacccggatacgtattaccatcggctacggccccatggccaggggacgcacatgcagatacatgttaccatcgggtacagccccatggccaggggacacccacccagatacatgttaccatcgggtacagccccatggccaggggacacccacccggatacgtgttaccatcgggtacggccccatggccaggggacacacatgcagatacatgttaccatcgggtacagccccataaccaggggacacacacccagatacatgttaccatcaagtacagtcctatagccaggggacatacacctggatacatgttaccatcaggtacagccccatggccaggggacacatacctggatacatgttaccatcaggtacagccccatggccaggggacacacacccgaatgcatgtcaccattgggcacggtcccatggccaggtgacacacacccagatacatgttaccaccaggcatggccccacggccaggtggcccacaccaggatgcatgtcatcatcaaacatggccccgtggccaagtggtacacatctgaatacattcaccattgggcatggctgtgccatggccaggtggcacatacctggaagcattcaccatcaggcacagctgccctgaccatacccccatcctcctgtggacccccatccccacagtgggggcctttcttggtgaaatggcacagcagggtggtgaaagggcctccttggaaccagactgcttgagtttgaatcacagctctgcctcttaccagccacgtggcctcgggcaggctgcatgatctctctgagctccagtgtcctccactccacagtgggagccgcacaagcttgcctaccagaaagaaccgtcagtgaggcggtacaggcgctgggcacttcacacagcctcctggggccagcacacagagccatttctcccgagtgtggttcctgggtctatgggggcccgcgtgccctagtgggcctctgtggttggccttctgggcctgcccctgcacatctggtagccagctcacccctgcttcccctagtctaacttggaatttggctagggctgccaatcaagatgccctgcccaccatgggcatgtgaccagacctgccaatccttgaagcactgtgattggtccaggggcaggcacgtgacctcagccaggccaatcggtgtactttcctggtatttacccctctggagttgctgggtggggaccatgtgtatcagacttgcctatgacagcctcctaccatctccaccctgtgctggacagaggaagccactggaagcagcagaaaacgcggccaacactcctgggattctgctcacctcccagcgtccacacagccaggcaccccctcaccccacccttcccaacagcatgcacctctgcagtgggctacattcagaacatgcacctgggtatccgacacacgggtacacactcggcggtcacgcagacatgcactccctgggcccagcactggtccaagcagtgggccactattgcctcactgagtcctctcacacctgccaggtaggttctagaaccaccacattcacagatgaggtcacgggtgcgtggcctcacacacccaggtggcctgagtcacgcctcgttgttgtgatcttgacaaagcaccgctgtctcctggatctcggcaaccacacagcgatatcctgcccttttgtggccactgcccgacaggctctggggccacaggcaagtttccctggctgccaccacacccctagtgtccctcagcaacaccacagccacccctagtaaccctggccctaacccacagcatctagcacaagcctctgggtggcatctgcatccccccaggccatgtggatccactggaccctggagcatttctatttggttaaggccacagcttgggaaggacaaagatggcccagtgcatgtgaacgtcctctgtgcactgtgaaatggaaccgtgcagaagctgtggttgatgtggagctgttctcttgggacttggtgggacaggatggggagctttccagaaagaccagacaggaggctggggctcggcgctgccccattcctaatccccacttccctagagccgtcacctctttgctgcctggggtgagggaattctcccgactctccaacacaccttcgggtgtcctgaggcagaagttggcctctgcctgggtccctcagcctgggtgcacctggtaacatctggccccacccacacatctacgggaaggtagaacttggcagaagggcagaagaccctttccggaggagcaacactcaagccaagtgctgagcttccatctggatcagcagagccctgctctggtgaagccctgtggcaagcctcccactgctccccaggccaggtcacctcatagctggggcccctgggggtgtgcagtgcccagcctacagctgggagacagcacatggcccagggcccagtgatccagccactcccccatctgacccccacgcagctcccggccatgtgtcaagccacttgtaccccaggtctctcccatctcctgtgttacactgatccccttccctgagacttgcaggagctcatcgacagggttacaagagaaccgcaatcggagaagagccaccagcacatagaaaaaacgagaaatgctggccgctggcagcacagttccttctcagagtctctgctctgctctttccttgaggatgttttctcttccctccatcagaaaacctgtttgcctttcagtttcaacccaatgccacctcccacattgcccctaagtacccaccctcctcaaggaggtatctgccccttctctgggtccttgctgtggcaaccacacaccatgttagtgtggtgggcaggcattcgaggctcccggctgaggttgcaccgcttcagagtccgtcgccacccttcacccctgcaccgagccccacacgctactagcacatcacagggactaaactgctgctgggtggattggctacaggccttctccagcaaggaacatagtttatcttcttccttccagaaacctagctttaatcgaggcgctcacctccaggaccgaagtcaaggtgtcctcgactccaacagccttgagtccaaggctctgtgtgcctacagccaagaacatttcaccaggccaacagagagagaggagagagtcagagagagagagcagagagtccgagagagagaggcagagagagcacgcacagcctggccaggagcaccagctgctgctgtatcagtctgcattctctgggcatgacaaatgttcaacacaacaaacgaagaaaaatgaaccatttccattgcctaaaatactcccatccccacggggcttaagataaaagtaagaagggacagacattgaattgaagagaacgcaggtggccatgagttctatgaaatgcccacgtgtggccacactcccctccctgggcacccctgcctttctaccagcatgcccgggcctgccccctgccctggagaaccaggatacccagctcctgggcagagagacacaggctctcaccccatgtaggattaaatgaggctaactcaaaagagctgcttcataaatattcacgtccagcccagaggggctccaggccttagaaagagccagagctctgttcacgccccgaggtcagagttcatccccagaggaggtcctgggaccctcattcctctaattactcctgagagcctggcccagatggtagagacgggatggaaagtctcaggtaactcagatgagaagctaggagcagcgagatggagccacagacttggggcctccccaggtgtgccctccgaaagcacgctggagcaacacactgtgcatggatggatggacggacagacggatggacgcgatgcgctggaacgatccctgccccaggaagaaaggaagctctgacacacgctgcaatatggatggacctcgaaaacgtgacgccgagacaagccagacacaaaaggtcggatgtcgtacaatccacagtccacccctcggggagtcatactcgtagacacagaaggtagaatgggggttgctgggctggggatgggaatggggagccggtgtttcataggggccgagctttggttggggaagatgagaacgttctggaggtggatggtcacgattgcacggcaatgtgaaggtgccgaatgccactggctgaactgtgccctcaaaatggttcgtgtggtaagtgttatgtcatgtgtattttatcacaataagaaaaaggagggccgggcgcagtggcttacgtctgtaatcccagcactttaggaagctgaggcaggtggattacttaaggtcaggagtttaagaccagcctgaccgacatggtaaaaccctgcctctactaaaaataaaaaattagccgggcatggtggcaggtgcctataatcccagctacttgggaggctgaggcaggagaatcgcttgaacccagggggcggaggttgcagggagccaagatcatgccactgcacatcagcctggactatacagtgagagtctgtctcaaaaaaaaaaaaaaaaacaaacaaaaacaaaagaaaggaaggaggaaaatgatggaggatgagacgaaaggaagagttctgaactttggaagcgggagtggggttcaggggcccccattcctatggctgagctcttgctcagtgcttcaattactcagcagggagagagattgtcaggacaactcaaaaactccaaggtgcagtgaaaaccccacccagcccaccactggcctctcacccacagcttcaaagagggaaggccagggaaaaaccccacggtcattaaatagattgtgttgggggaaagttatcatttcggtaacatcgacggaaacatcaggaaatttccgcttctgagacacatgatctccatccttccttccctctggcaacttcaggagccgcctcgcctgttcctgactcaacaccaaagctcccggcagatccctcaccttcttgaaagcagctagcccgaggtctgacccggtattgatcctgaagtgcagacaggaggcagccggagaaaccgaacgagactcccataattacatggagataagactatcaggtgtaattaaacagtatccacaggcagaccacttggctacatcctccgtctctcccctccctcctcctccttttccccaggactgcaaaataaattatcctgtgaagtcagcagaggctgagctatggaaacaattaaacagaaattaaatctaattcatttatactctgagcacaagtggataatgtaggtttttttctctctctctcctcttttcgccttggtgttagagaggactattatgggaaattaatcacgagacatggcagtgaaagtgatctatcactctttcaagcgcacagacccactatatacgatctatgacagcagctacaaatgtgcgagtgacactgtttgggagaagcgggcaggcggggatgggggcgcctcacggaagcccctgtgatggcctggccggggccccaagtcctccgggtcggatggtgctggaaagtgccttgtacacgagtttccctgggcttgcttaggtgtctccaaagcctggctcatacccacgtgggggaaacactgtaatccctgaaggctgggggagctggggcctggacggctgtggggaagcctactggatttttctcccaccactggaagggcaggcctggcggaacagcccctgggaggaggacctgcaagaacaagccaggcctcaggctccccgtgcaaaaccggggttgaggcccccttgccgtgccttccctaacagaagcaacacggtgcagagtaggggtcaaatgagcaaacccacaggaaggcattgaggaaggaaagccgcagagtggtgtctagctctgggcccacagaggctcgctccagctttcctgctttcaagagaaacaatttggaaaattgttttcccgtcgtagggagggtggagatggcataaatagaacatttcctccaaatgaagggagggccgaggcggccacggccaggaacggccagaaggagaaagccagccatcgcgggagacgcgtcttcaggatgctgtacccgggaagcaccaagagaagcccggggctggcagctccccctaaggcctggggacaccgggcccccgaaacagatgctccggaggtaaaccaaggagctggggaagcccgagctttgaactcagcataaaaatcggaagaaacaaaggccagtttctattctgcttctctcttgaagggcaggcagccctctcggcagatggggccatccctgggagcctgcacaccccacgcccccacccccagggctcacactccccacagagtgctcctgccatgctctcaaggaagcagagcaagagacctgccagtgacggcaagcaaaggtgtgtcctgcaagtcctaagccctctggccctggaatggccccggctttgcagcccacccagctcagaggtgggaccgagctagccaggaccagggtgggtacggggaacagagcccctcaagagggaggaggccacagccctgcttccctgctgagaggagacggctccccacccatcccctcccctttacctgtcctgtccatgctgtcaggatcacagcatccatcatcacactgtcaagcgtcagtcttacctggaaggtttggcccttgaccctggctcctgggaggtcacccctaagcccttggagtagcctgcctgaaagagcatccctgtttacctcgggccccaccatgtcagcttgacccttggagtggctggagattgaggtcagcacctgggtggtcagtcacgtctccatgactgagacccagtaaaactctggacaccagggcgggggtgagcgtccctggctggcaacacccatatgtgctgtcccgcatggctgctgcgagaggaccagcagagctcctggctggtccccgggaccctgccctgcctctgcgctgctccccatggctggttttcctctgcatccgttcactagaataagctgtcacctcgaggatggtggctgtgccgagttctgagtcctagcaaccctcaacctcagtggtccacaaagcccgttgaaagtcaccaagccaggtctcccctgtgcagtcgaggacaccgaggcccaggcttgagtgaattgcccaagtcatgcagctccatgggtgagggggctgggaccagtgtccctcccagccttgccccgcctcctcccctgtggagtggggctcaccgggcaatgtgtcagccagtggcagtgtgacaacgccccaggcgggcaaagcaggtgacgaggcagcagggcaggagacagcaggggtgggacgcaggctgctccccgtcagccggagactggggacgtgcagggcagctgccaacctgcatctccggggacagcagtgaggactagaaggagcatgtcgggccaaggcagggagcagcctggagctgcagctgagcgagctgccctcctgtgcgcacgtgccagggtccaggggtcaggtgccaggaacacaggatgcgcattaaaaccccagcccatactcccgcacccagacacacacgttcccacaccgcctgccccctgccaccagcccaccagccgtctccctctgctctgcctcatgcacagggccagaggcctagaagtgattaatgtcctcggccacctgagcctgacatctcggcctggggacagccggcgccaccctgcaaagaggccagcacctgccacggggcctcaggctggcagagcacaagggtggggttcgtgttggactcccctccagggcggcagggaaagagtcgggccctcccggctggccgggtgccacacagcctcccccggcagacacactcgcacacagcttccagactggcttctatttgaagtcgccccatgctgcaagaggtccccaccagatccagctacacgaattatagtcctcagagcaaaatgcaactgggaggcccttgtttgaatctcacaatggtgacggcagagcactgagccaagcacaagccctcccgagcagggagcacacgggtgaagccagcttggctctgctgccagcgccactcctggctgtctgggaggggccggaagacacgcaaagaggatggggggcatgagagacacagcttgtcccccttacaccaggtaaagccaggcacctgctttaccacagtgaccacagcaatgcaccagtacatacaggcatgcacagacacacacagatacacactcacgctcagacacacacacacacattctcatgcccaggcacacacacactcacagacacacgcacagacacatgcacagacacactcacagatacacacacatgctcagacacacacattcatacacacattcacacactcacactcagacacagatgcaaacacactcaggcacaaactcacatacacagacacacacataccctcacagactcacactctcatacacacataggcacagacacatacacagagatacacacattcagacacattcacacacacacgcagatatatactcacagacacatacggatacattgacagacacacattcacacacacactcatgcacagaaacatactccacagacatacacattcacatgcagacacgtgtagacacacacacagacatactcatatacactcacacacagatacattcatgcatagacatatgaactcacagacacactcatactcacacacggagacacacttatacattcacacaggcacacacacacacatatacatacacaaatacatagacgcacacacagacaagtgtggacacacaaaaacacacagtcacacatgcacatacatatccttaagacacttttttgctaaataaattttatctcggctcattcaaagtcctagataactgtgtagcctaactaatgtccattgccagtgaagtggacatgggagtttttcagtgaagtcggtggctcaggactcagggccagagtgagcggcaaaggagggctctgctgctgctcccgctgctggtgacaggctgaccttcacccgacggaatcttggaccagtgcaggccacactggaggggagaccctggaaaaactcgggcaactggaattgctcctaaaatgtgtggttgcctctaatgctgaaaaactgttttcacagcactgtgtgagctcctgagcagctccccactctccaagtctccacctttgaggagctggttctctggtgctgtttttctggaatgttccctgccattatttttctagaaattgctctaacccagaggccctgtgtcatgctgtcttcctaaaggcagccctgagccttaagtccaccagtctctagagattctctccctcctcaaaaaccatcctcaggagctagaggcccccaaacttcacgtccagacacaaactctcctgctggcaccagggctggaggcctgaggggccatccccaccgcacaccacccctgagctaacttttacccaactccaactattttcagggtacatttgggtgttttgagagatccttagttgtattaagacggcatcacatttaaagtcctctcacccgacacacacaccacctctccccactgagaggatacgagattcacctcaggaatgtcagatctcatccaaagtaaagaagagggctgggcgtggtggctcacgcctgtaaacccagcactttgggatgccaaagcaggcagattacctgaggtcaggagtttgagaccaacctggccaacatggtaaaaccctgtatctactaaaaatacaaaaattagccaggcatggtggttgatgcctgtaatcccagctactagggaggctgaggcaggagaatcgcttgaacctgggaggtggaggctgcagtgagccaagatcacgccactgcactccagcctgggtgacagagcaagactccgtctcaaaaaaaaaaaaaaaaaaaaaaaaaaatgcaaggaagctctgacgcaggccagaacaggatggactttggggacattatgctgagtgaaatcaaccaggcagaaaaggacaaatcccgtagattccactgattatgaggttcccagaatagccaaatccatagggacagaaggaagaatggaggttgccaggggcttgtggtgggggggcgggtggtttgggagaatgtggaattgtttctgggggacagactttccatctgggaggaggaaaaagctctggagatgggtggttggtggtgacagctgcacaacaaggtgaatgctctacataccactgacttctaaacggttacgacggcaaattttatgtgatgtatattttatcacaatctaaaaagcaaagtttaaatgtctcaagtgtggaactgaacttgcctaaatgtcaccagtcaccaccaaaccccactgtgtttcaagtgttcagagggcgggaaacgggctggagggaggagaggtccttctgtgctcttagacacatccctgaaatgttgacgaggaagcttccgtgactcttcttgcgttcctcatggtgaggagacccaggtcctcagtggtgactttctattttgagttctgttgtccctggtgagccaccaaagagaggatgtgatcaacggccccattggttcatggacagagagttactgagcctggtggagcttcaggtgaacacgcagctgccaggattccggtgagggataaggcaagctgcctgccctcgggactcacaaccccgtggggtagaaggagatgggcaaacacaaattaaacacaaggtgataaaacgcaaaacgaataaaaggcgaaccttgtaaactagccagcacattttgagtggtccttgatttcagaaggtagataagagttcggtgtcctaataccttatcccccacagcctctccacaccgtgtatctcagtctcccctggccacctcggtggcactggaaaacggggccagactttcacagcctcaagtggaggttcgggtttctgtcctgccctcatgaccctcttgttgttcttcccttctggcagtcagttttcccatcattaaagccagggagttgggttaaatggtccttaagatccctttgaagtcccgcattctatgattgaggacctttgagttttcctcctgagagaggattccaggatcacagagcattctgaaaataaaataatcctgctccccatttggataaaacaatgagtttggcaaaagggtactgcagacaacaatgtttgggcaggcttaccaacacacagtagacatgctgcaggttcagagccatttccctggaaccaatatttacaaacactgtctcagcattcaagcaggcaaacagcttcacaggagtttaacggagacctctcctcccccagcttaatggaggcagcccgctctctcttcggcaacctcccaatggttttaaagaggaaaaacacccacaccaaaacacaccttcactctcacggcgggcatttaggctagctctgggatttcactgccagatgactaccttgaatctgtggcagcatccccctcctaggaggccaacctcaggttgtggaagctctttcctccctctaccaacaacgtgcagaactgggggctggattctgctgcccctggctgtgctgggagtgtggagcaggcacgggcactgggggttagatcctgctgcccccggccgggctgggagcgtggagcagacacgggcactgcatcttccagcacatggctctgccgtgcagcaggtttgtaaatggagccctagtttgcagagcacctcgaacatggcatcatgggtgggttcaagccgaatgaatatgcctccgccccacagcaggtgtaaagggagccccagtttgcatagtgcctcaaacacagcatcatgggtgggttcaagctgaatctccccaggccctgtttggttctgtcccaccgagtgcttaagatctccatgattccataattggctaacaaggattcttgcatattattcactgtcagagagcaacaccctgccatgttcctctaagcatattgccctcaagggctctggcatagaaagagaccaaccatgtctcccaacctttcggggtgccctgtaaaccagagttcggcactgttgacatttggggtgggagagttcattcctagttgtggggccgtcctgtgcattgtgaggtgtggagcggcgtctctgggcccctcccactggacaccaggagcaccccacctccaacggagaaaatgcaagatgtctccagacattgccaaatgtccccccggggcaaaatcaccccctagttgacaaccctgccataaactaaagcaccacaggcacatcatggggcaagaatcaccattctcctaaaaaagagtaagccagagaccagggcctcttgtactcattacatggagtcaccaagttacaggtgagtttgccaaaaagtgagaaagactggtcttcaattccctggaaatgcttcccagtcttcccggaggggccagctgccaaaatcagctggatttctataacactgcactctctctcacccccattctagaattatctgcacctctgtaaagtttctataatcacatacgtgtaatcaaatcaaagctattaggcttgccaggagctcgatgtctaaaggaacattgctggaattccttgggtagtatattagaattccaatcaccatcatctattttttctaagcttgggtttttgtagaggaaagttgtttccttgtttgagtatatattctatgagtacattttaattcaaaagggatcaaaacattttttctttagaatttcaacctgtctcttgtgataactggaaaaatgctggaatcccccagccaggatgggaatcgctgacctacagcctgcgaggaaagcccgagaaaagtggctggattcagtaggacgagctggctgtggagacaagccaccgccacccccgacggccattggctctgctgcggctcaaaggtttgcctccaggctgcttccaggttggggtacaccaggggcactgacaccacccagccacagtgcaggagactgagccaggaaaggaagtccatgcagccagcactcagccatcttacctggaggtgacgccaacactgccagtcacaatccctcagggagagctagcaagttgtgtggccccacttaggagcaatggaggcagcaccatgaggggagtgtgactctcaggtggtcacccacagaggctcagccagagcggccctgaaccctgcctggaggagccacccagaggcagcccccacatgatcatgaggaagccagcctcatctacgaaacgggaccaggcgttgagccaagtggcttccttcccaaaagagaagagaacccaggatagtcatcatgcattttgtcacctatcacacgatcctaaatcctagggaatttctgcaaggctgtgcctccgccactgacaaacagcgaggtcaggacagtggcctgaatgccccgagtggtccccggacgcactcttggaccaggtcatgagataggaagtatcctgatcggtagcaaggggtcagagcagaggacggtggggttggcaaagggaaaaaccacaaaggcaataggggaagggcaccaccgtcccagacaaaccaagtcctgctggctggatgtgaaatggacatgagcactcaattccgttgccctggcacatggagtttgaagggtcatggcatggctcagatgaaccaggcaggcctcattctctgcagagagttttgtatagacagtgattcaccttgcaccttcccgttatacccactttgggtgagggaactgagtgtatgagagggtttggaaaaaaaccatcgtgtgacaccaggtcagccccctcctgctcttagctctgcagccagccacgctggaggcttcaaggtaaccagacacagaaggaccctacagctggaagactcacaagtcacctgtcagccccatgaccagtggccaatcccccaggtcaggcatctgcctctgcccccaccctgggcagcctgagctccacctctgtcctcctggctggatcctatcttctcttcccgccactctgagctactcgtgcctctaggcacagaagtacctccctgtcacccgcccagacaaaggagaatcctttagctcggcttggtctcctgtctgcacctgcggatgcagagcacgcctgccacctcttccctgccaggagcttcaattcagttggctggaagctaagcccttccttttctttcttttctctcttttctttctccaattgcccttctaggagagagaagaaaagccaggtctttttggaaacgcccatcctgccactgcatatagaagatccaccagcgttgaaatctcaacactaaaaaagaacctgggggagcacggttccgcagctgtgcctggtacttctgtgctcagctactcgatgggctttgtgccctctcctggccaactccctcccccaccagctttgtctctctcgtgtctattttagtggctgatcagtgtgcctctgtttcccaacccagggcttacgcatgtgtatttctatacattattccctccacggaggcttctgagccatgaaaatggctccttatgcaaatcaagggctcctccatctgcttccgatatcccccacttccccttcataacctgtttgaggggatgcggtacaggcagcagatgatgcaactttatttttgtaaacccagttggtcctggagtgctggcagccacaataataggagagcatgcctgttgctgcctctcagtgagaaaccagccaggagggcctcctggggcaaaagggaaggggcggttcggggtctcagcaaagaggccgatggagtccttgccctctccgctccttaacaccttcctctttctgccgagtcagggcttgctgtggattgaattgtgcccaccaccaaacaaaagacacgtcaaagccctaacctctgagtacctctgaggagaatcttagttgaaccactgagtacctctgaggaggatcttagttgaaaccctgaggtatctctgaggagaatcttagttgaacctctgaggtatctctgaggaggatcttagttgaacctctgaggtatctctgaggagaatcttagttgaacctctgaggtatctctgaggaggatcttagttgaacctctgaggtgtctctgaggaggatcttagttgaaactctgaggtacctctgagtaggatcttagttgaacctctgaggtgtctctgaggaggatcttagttgaaaccctgaggtacctctgaggaggatcttagttgaaactctgaggaggatcttagttgaacctctgaggtatctctgaggaggatcttagttgaaaccctgaggtacctctgaggaggatcttagttgaacctctgaggtgtctctgaggaggatcttagttgaacctctgaggtacctctgagggggatcttaattgaacctctgagtaactctgaagaggatcttagttggagaccgggtctttgcagatgtaattaagttggaagttaagatgaggacattttggagtagggtgggccctacatccaatataactggtgttgtcccaaggagaggaggggatgcagagacacatgtatcggggaaggccgtgtgaagatggaggcagaggctggagtaaggcagccaccgtcacggagcactgcgggctgctgggagccaccaaagccaggaagaggggagggaggactctcccctagagttttcagagggagcacggccctgcgacaccctcccctcgcaggggatgaccgcccagcagcccctcccatctcacaggtgctgttgtgactgggacagtgtctgtcttcactctgcaccgcccctcagttcctgcttcagggcctcagggtatgtgctcaaaacatatttggcagaatgaaggcagagtgttaagtaactgttcccacataacagcacagcagcctcaggtagaggtggggacatggaaacacacctccatgtgaatggatgctatctcttgtgagatctcatttaacaccggaaggacactacttacattccagtctgaagctgcattcccctggtgaagggtacccaggattccacgcacttttgcaactttctatgagcctatagttatcgcaaaacaaaagcctgggggatgggggtgcattttctttttgttttgacaagaggctgtaaagcccagcaaaggttgacccatccccccaccgcatcacccatcaccccaccgcatcacctgatcctgaaagtccagaagacagggtttgaattcccaggaaggaaagcatttagggagaactgtcccttctagtcctatgttttcaatcctccacggaaccagttgcatggctcacagcagacagagggagactggggtgcaggagtgggatgcgtgcaaagaagcggctagctaaagtgggggcggggtggctggccagcagcatggcaccccgggagggaggtggctgatcctgcagtgaggaggcatgaggggccctgccgaggccccaagagggaagaggatgcttgtgtgaggtcaaggggtagaggacacagtctgtggcagagggagaactggtaccactagccctggggacaccgctgagatgatgctgaggtctgggcatgctccaaggcagaggaaggagggagagtgaggaaggaagggtcgagggcactgctcatcctgcccccgtcccctgaggctctagaagaggggctggcaaactccggccagggccaaacccagctcccccagttcccccagctcaccacctgtgcttgtgaacaacatgttgctgggacccagcacgctccttcacgttcatccatggctgccttcctgctgcatggcacagccacgtggctctgagaggctgagaccatctggcctgccaggcctggaatatttacaacctggcccttgacagaagaagttcgccgacccctgcttcaaatcatctccgccatggaggagccagcgtgaacttccacaaagcctggatggaaggggctttttaatgagatgaggcagcatcgagcacagcccacagagaggaggaatcggcaaagtgagttttcttcgttctcaccctggagaaaacctccagctgtgcaccacggagagagtggactttgcgggggccaagctggggtgaggcacctgccctgttatcaatttaaagttgtattttcaaagcagggatgttgtcatgctgtggcagaattgtcctgatcaccctggccctcgtccctctgcgaataaatcccccacgcatggcaccatccaccaacagagcgttcttgcccaaatctgccaaagagtatgaaatgcgtaaggcccagagccgtgcctcctccgcctttgtgccgcagccctgggctcagcgacagctcacccggggccaactgatggtagtttactttgaggccgtgatggaatccatccacaaaaattcagcaccaagaggcagcccagccctgcaagccagaccacagagaccagaggggaggatggccgccccagcagttcccttgatcagcgccagcctgtgtaggccctggagcttcaaagatgaatgagactctgctccagccctcgggtgcctgcaatagggctgcagaaaccatgaagaagcccagacgggacaatcaccacagtgtgatgttctggggaggtgcccacatgccgcgggaccacagaggacggagcctccgggagcttccagagcagctactccaaggccgtctatactgggaaagggggtctgtttgcagcagcggattctaagtaactcacgttgtaaatattccaggcctggcgggttagacggtctcggccagtcagagccacgtggctgtgccgtgcggcaggaaggccgccgtggatggacgtggtggagtcatattgtgggctgctggtattcttggccctctaccctaaggtcgctggggctttgtgccccagtccaggggctcctccccgccaggacttagcaatcgtttgcgcagagcctgcccactttctccttggaagaacgggcagattccttcccagaaggtgctacacggaaaagccccattgtcactcccaagcccccagaccccacttctcagtccccacagactgtgcttgcccatgggggtggggtctcctgctgccggcccaggagggtctgcagcacaggtgcccacctgccctgccagcatctattgccgcccagaggccccaggtgggcatgaggaggctgcctgcgtgtgcggaggagggcggcccaggcgagcaggtgggcccaggcagcttggcggctaagtgttctcggcatctgaggcggcttcacttttcggcagccagtgaaggacaagcaccctgtaaatttagaacgcgtgatggctggctgcttttggtattcatctgagtgcacgggggagacggaataatccacccatggtcatgcccttacatcccagcccacgtcgctgcctgcagaagggaaaacctttcccaaaagtaaaaaggtgatgggcccctctaaggccggtcccaacaccagccttggccgcctcccaaggggaccctcctctccttctcacatttagctaaaaataaagccctttttggcagcaaacgcacccagtttccccagaacataagctccccgggaatctagaaacgaaagagctctacctcttatcaaacccagatggattcctgaaaatctgtgtccaggcaatttgtgcaaatcaatcacgttctccgtgactcaccttcatctgggatgcgtccctcacagctgaccgccaggccgctgaccacccgctccgcacacagcaggctggacagtgccggcctgcagcaaaccctgcaagaggggccagctgctgcaggggagggtcctcaagggatgtggacccttgaacccagattctgctgtgcatgttgggaggtcaggttcccacaaagtgaggcaggcctgaatgcagatgaccctgccgtggattcttttagaccttggcctcattccttctcaggtggcagcgccagaattaccctggaacctctcacaaagttgtcctcggggcaaatgatctgaatgtgaataactgcactggaggggggaggggaggaggaagaatgaggctcagttccccctttgtacacgttatcccctgcagctcctaaaggcagaataggattggcccaaggccagccagctccaggctgggactccatgtggagcctagggtggcacagaggggattgaggtggggcccaggtgagcccatttgcactgcagagagaagcctctggattgggacagaggaggaaccaggttgcatgcagggaggctcagccagagctgatgaggttgcaggggctgcagagatggacagaaagggtcagatccaaggtgagtggactgggcagggggccacacgtgggaggctggaggagtggaagtaaccgagatcagcgatggaggcccacactccagaggcccacactccaggctaggagccactgaggccaccacacagagctcgctctccaggaaggagcggccaggggcccctgcctctgtccctactcttgataagggtggaaaggggttgtggggacagagtcttggccttgctgccctcacatcgccagcatagtactagaatcctgggacacaagcaaaggccacagggaccgattcctgccctatggctctctttcatcaggtgactattgaacacgtgtgtgtgtgtgcacgcatgcacgccgcctgtcagggaaggggtggcccctgtcgaaactgctctcagcaggtaggagtttgatgtcagctgacagacggaagctctggcagcagactttactggtttgtaccaagggaaggggctgtccccagctggactcagcattcctccaatgacagaaagacgcagcgcttgtcctgtctcaagtgccaggcaaggtcttgactcccgtgattccttttagttttcacatccctgtgaaagaggcgttgcccccattttctagatgaaggagactaagcttggagaagttcctaagaaccagctggtgggcagctgggacttgaacccggccatttcatgtctacttcatggcctctgccctgtgtttccctggtaggacggtcccagggccgggacaagctgcgctctttgtcctccccaactggaggcagagagtcgagtccaggcatcgaaaatcctcccaagcctacacctggccatgcccattggctggcggcggcagaacagaggaatagtgacattgtcagcgagggtggcgataaacccacccctccgtgctcaacataaaagccacagctccatgctcaacatggtctgcacctgtcagggaggggcctccaggttctggcatgactgtttctttctctcctggccgactgggggagttttctgaaaagcatttccattacttcaaccctcacagaaaccagcatcagttctgcccagcccagggtgccccgagcatgaggcatagataccccgcgatggggaaggggaagctctcagggtgtggcccccttgggaagagcccaggggctggtcatgggtgctttgcagcataggagggcagcctgggtcatctctggtcagagagtctgagcagcctctagaaagatccgtggtatcactttttccttattataaaagttatacatattcactgtagaaaatttagaaactacacatatgcaaaaagaagaaaataaaaataacccataatcccactaacccgaaataactcctgttaacattttgagcatatatacactcccagactttcctatgcatagaatatatattttgggttctaagtgggatcatactgtacattccattttgtaacttttttccatttaactctatgtcataccaaatcattaactattcttccacaacagcatttttaaatggctgaattagccaaaaaatactaaagggacagttgagggcaggagaggaaattttacaacacagaaacttgcaattaagcattaaataagaaaacgccctttgtaaacaaacgtattttctctctttagtccaaattctacaatagtgaaaaacgaaaatgtcatccaacttgagacaggagacctcatcacccatagctggtgacggcttcaggaggagccggcatcaccgttcagaagggctgaccaactctccctgcaggtgggaagttgtctagatatttctgaggctgtaggattgcagtcatcggaacattgtcaagccattccccggcgagatgctcaggagtggctcagagggaggtgggagaggttagaatccgaatccaaggggatcccacaggactcacatcagctgtgccaagagcagggtatgtcgtcacatatgaaatgggagctctgtggggtctgccagacgctccccaggtcctggaggggctgacatcctttccagtccaggctcggaaccagccagaggctgttccacaccactggtccctgaagcttggtagcaaatccaagaaaaaaggtgttcctgggggtagaaccaatgatgaatggccattgccgtgccagccccaagacccaccgtgacctaacagcggtgtctggagaagaaatcaggcttgtaaaacatcaccatggccaagcatctgtgtctccccagtttattcaggtttcttttctcaatgtgctttagggaagccccttcaggaaaacgcccacctgccatgtgcaaaacaaagacagagggagatcgtcgccccctcggaagtcggtttgacaagtgccccagagactgggcccacagagacaaagaccagggggagaaatacgggagagtctgctctgggggactgccatgtgggcagctctcatgcccagagggatcccagctgaatcggttaggatgctttcagctgcacccaacagaaacctgacccaaactggctgaagccacgaggaagcgtgccagtcacatgacgggaagtccaggctgtggcagctgcggggttgggcgattcagcccctctctatgccacaaggacacaggtcctgtctcctgcctgctctgctaccctcaatgtaggcctcccccttgggctagaagcagcagctccacggcaacatcccaaggcccctctccaagggctgttcacagaggctgactcccgtcctccctttcctgaaagacactctctttgactcattggccagatctggggatcacctataggtaaggagaagagggagggtgacagaggctcccagaagtcagcccaccagcaaggcctctctccagcaaagctcattcctacctgtcctccggagagtgtcacaaggggacagcggcctccaatctcccgattcctttactctcccctgttacccaagtgagtcaccccaaacgaatgaggccctcagatgatccacaggctggaaggggcccggctacccctcaaagtttcctgggcttgcaggtctgctgcatggctgcggtcctggccagaccacattctgggcggacaaggcaggatagccagcccacaaagacacagtatgcgcagccaggcaaggttgcctgtgttggggacagtcaatcggacataggaataacgtgtcctctgcacccaggaagcctgcagcactgagccgtctgcatttgctagggccaccagctgccacttactccaaggaacagggtgggaagagtccacacggagaggggccgtgggttgatctctgctccccctcagtcacaaacccactcctggtttccctgcacctcccccagccactgcacccctgcccgtgaccagtagcggcagggtcatctccacaggcccctccctccctccacagcttcctaagcactgacaggccctctctgtcctccctctccccactttcattcctggctagatttaagctggtctcacagggggctggggagggagagctgcaatccccatggccaggcagttcggccccagacaccctcactctgtcacccagactggagtgcagtggcgtgatctcagcttactgcaacctctgccttccaggctcaagcgattctcctgcctcagcctcccaagtagctgggattacaggtgtgcaccactaccacccagctaatttttatattttcagtggagacagggtttcaccatgtgggccaggctgaacttttgacctcaaatgatccacctgcctcggcctcccaagttactgggaatacagatgtgagacgtggcacacagcccacccccattattctaatcaccatcagatgtgcccttgtcttgccctgcacaggcctggttatgtgtgttccagtaaaatacagcaccatggaagcctgaacatctgtaaatctgccagctgagtggccctgcttaattacagctcccaaaacacccactgtggtggcatcagccccgtcaacggtgatccattgccctgatgggcaagctcatcaccctcgggcctccttggccacgggtgttttcccctgaaggagccggccacagggcatgcttgccccgccccagcgtagcactttgcagagtcccacactgtatcatccgtcctctaacagaggcaggacagtgacctgtttggcaggtgtgtgtgtgtgacttgtggctgccgtaacaaatcaccacaaactcaccggcttaaagcaacagacatttggccgggtgcggaggctaacactgtaatcccagcgctttgggaggccgaggcgggcagatcacaaggtcaggagatcgagaccatcctggccaacatggtaaaaccccgtctctactaaaaatacaaaaaattagctgggcatggtggcgagcacctgtaatcccagctacttgggaggctgaggcaggagaatcacttgaacccaggagtcggaggttgcaatgagctgagatcacaccactgcactccagcctggtgacagaatgagactccgtctcaaacaaaacaaaacaaaacaaacaaacaaaaaacaaaaaaaaaaaaaaccaaaaaagcaacacacatttatcctcttacagttcagagtctgaaatcaaggtgctgggaggtttgcgctccctccagattctaaggctcctccctcgccccttccggcttctggcattgccggcggtgctcagtgcacttgacttgttgccaacatcactcctggctctgcctccatcatcatgtggccctctccctgtgcatccgttctcctcttttcttagaagggcaccagtcattggatttagggcccaccctcatcttaacttgatgaaatctgtaaagaccctatttccaaataaagtcccattcacatgtttgggaggttaggatttggacctgagggatacacagccagcctgcaacagtgggtgtcccctgcaatgccaaggggggacagtgtcctcactcctcctgggccatgctagacacacaattcccttggactagccaaattctctttccctagaacccccgcccacaggtcctgtttctgcctttgaacaaaaacggacaaatctacttcctcctgcccatgacagactttgaaactgtggagcatcgtgacaggcctaccctctccccagtcccccaaggctcccagctccaattatgacccccatctccccacctcaaattgaggaggtgagtccctttgtgcccagctcttgggccaggccagccccaggtggtcactgtctctcctacaccaagtcacagagtggaccccaagtgtcccaggaggatgagctgatgggggtgggggagatgaacacacctggaggcccaaggcatgtccacaccccccgaggagatgcttcccctcaaacgtgcactgggtgctgtggtggggttgggggcaggggtgctggtgagggcaacaccaggcaaggcctccgtactcaggactctggagcccagcacaggggttggggcagagatgccaggcagctcttcccctgagccaggctatccttctgctattcagctattttgcaaacacaaacccccaaaacttaaaaccgacagaagaggagctgccccttcccaggctgttgtgaatacatgtaatctcatgatgagtcttctctcccacaggctgatggccctatggcatcaggagcatctgtgtgtgcctggcacacagcaggaacttaactaagccagtgggatgaatggaggaataaatgaatgaatgcacaggtgatctggctacagtggagagagagagctggagttttcccttctatgcccctttcctcccaccttgcagtccatgaggcaccgccctggagtgaagggcaagtttggccttgcgggaggcagggacaaccacagtcagggcaggaagcctcgatgccacctccctgccaaggcctggttccctgctctggagctgagctttccctaggcacagtaagagcaggacagtaaaggcgggtgggctttgagaatcatcctcgccagcccctgcctttagggcagcagtagggcagtgacacattcacggaggaactcaaccactgtgtggttccttcagacccaagaatcaggatgagatcggcaggaaacaggtgcccatgtgggggctggatgtctgttattcccaggagacccaggaggccaccattgtgagctcaggtctaagtcccagagatcaggggagggtctgatcacactggcccagaagcaacctcaacactgtatgtaaagtcaaagcatgggtatggcccatatgtaaagagtgccctgaaattaataagaaaaccaccccatggaaacacggacaaagcatgagaacaggctgttcacataaatacgcatgcaaacaaccagtaaacacacgaaaaatactccaccttcctcaagttggggaaatgcaattaaaatgctgagatgttttatatgcttagactgaaaaataaggactaatacgtggtcaggtgtggtggctcatgcctgtaaccccagcactttgggaggctgaggcaggaggattgcttgagctcaggagtccgagaccagcctgggcaacatagcaaaaacctgtttctacaaaaaatagaaaaattagcagggcatggtggcacatacctgtagtcccagctacttgggaggctgaggtgggaagatcacttgagcccagggggtcacggctgcagtgagccatgatcgtaccactgcacccaagcatgggcaacagagtgagaccttgtctcaaagataaaaataaaaataataactgatgttggtgtgggaataaaataatcacatagtgtggaggcatctgtcaatacttttgactttttataaagtaacccaggtgtagttttaagttaaaatttaagatacacataacctttgccccaataagtctactgttggggttttctccaggaaagctacgagtgccaggaaaacacatagtgcatggtggtgtctgtgcattggtttgggaggagacatttcccattgctaacagtggttaacagttggaggtcagaggtcgccccaggagagttggatttggggaaggaggtcccagactattcatttcactttatacacttctgtgttgtaagaacaaagaagcaaatatttttatagctcatgcaactgaatttttaaatgactaagaacgtcatttcaaagtaaagcctttcaactctctatgctattacaggtagggtcctagatttagggaataagaacatggcgcatggttaactttgaatctcagatgaacacggttttgtttgggtttttagtgtaagtaggtcccacgcgatgtgtaacacatacctatacaaaaaaacctttgtcattcatctgaaatccggatttcattgcatgtcctgtgtcttatctggcaaccctggggacagcaggaggaaaaggaagaaacagcttcacaaatctctgccattttaatggatccgtttcctctccttcctcatgaaaacctgctgtgtccagggtgatatttctttctcccggtaatcacacgcatgcacacacactcacaggtgctgaccattcgtcaccctccaagaacattctgactcggagtgagcatttcagcagatgctgatattcagcgtggctccgatctgagagccaggatgtcacttcaaactcatcctgctgagagacctgagtctctagagcagggtccgggactctccaatgctgtgttccagcctgacagtgcccggtgcacggaagggagtcggcaaatgcagggagacaaatgaacggcggaggccccggcacacagtggaggggctggcatccacctccttaaggtgcatggcgtccaggccccagccccagaatcctcctcagcgtgtcaggcagggctgccccacatctgtgccaaggccagcatcctggatggtcctcccactgccaggtgctcctgctgttctctcctcccacgcaatgcacactcctccacacagaagggcccgggccctgcttccaaaagcagactccatgtcattcacataccgccgtggtgcacagacgtgggctgagagcggggagctacactcgggcctggagccggtgtggcctccgccaggttgtgggttgctcgacctcctggagcttcagtgcccccatctgtaaaagtggaggtcgatgaaatattcttgaaggggtttctaagcatttctgagagtttagggtcagtggtgtcctcagctgtcctaatccatttagtaccagttctacttcaaccggacacttcagagcatctcagccagagacacggggccactagctgcaagaaagttccttctcgcccctcttcttgaggcctggggggatctgcaggcccaagtatcctccgaggaactgctgcttaacccgagtgcttgtcgagcctcagcagccacagacgagacattagcgttacaacccacactgatctttgtcaattacgctccagtatttgagctctaaccagctttaaattgaatcaggacaaaatcatcagaataaaaagagcccaagccacagcctttcaattccagcactggaaaaaaaaaaagctatacatttcataatggccttctaccccataatgaacaggaaaaataaattagattccaagctaagggtatatttatgcaatttcattatgtgcccatgagcaagcctggttttcaccaagataaaaatgagctctcagaaacactcacactaaataaatggagtgatataacagcttaacagggagcgtggaagaggagctgaaggacaatgtcaaaaatgagaaaataaaaataagagaagcttacaatgtaccaccatacttggtgtacaaagtactagaggcgcctggagtctgtggccggcagcgggtccgcctgtccctccggaggaagcagctctgtcctcagcactccagggacctaaagccaagaacagcggaagggacacggcttctccccttgacacacgagcccatgtgatggcaaatccaccaaggctctctctgcaccctggtcagttacactgttaccatcaaaccgctaggcctcaagtcagttcttcaggcccaccccggctcctggcaagagaccgctcaccccggagcaggatttcagtggaaactctggctttgtctcagccctttccgtgctgatcagtaacctttcttcatctcactgacagagtccctcttggttctctcttttgcttgtctcagggccctcacgtttgatggcaccagtttcgagggcagagtgacacctcctgccgatgtcaccaggtgggccacggagcacggggctcctccagggtccccacgcactggctgccggggccttccctcgagtgtttctttttacagaacaaaaccatgttctctgctgcctttaaacaccttgagagcgtcgaccttttttttttttcatgtattgtttatcgtgcaacactccgagacctctatgtgagaggcgttttataagttcaggttgttgtgaaggttgacaaaataatagattcctttttattttttcaatggatatttacaaagctggaaattgtttcctgaaaaccctggcggtgtctaactggggcagactcgaattcagacagctcaggggtctctcccaaaaggcagcggcttcaccctccctggctgccctctgcagactcacaaggggctccccaatgctgtcagcaagggccaaggagaaggtaacgaaactatgcagtgtgagcgctagtggggcggctccctagtccctagatgaggaaatcaggaagagattaggagggatcccaatgaatcagcgaagaagctgggcttagaccagtctgtctgatagaaatagcatggcagtcccacgggcaattttcagttttctaggtggctgacgcctgtaatcccagcactctgggaggccaaggcaggtggatcacctgagatcaggagttcgagatcagcctggccaacatggcaaaaccccgtctctactaaaaatacaaaaattagctgggcatagtggtgcatatctgtaattccagctactcggaggctgaggcaagagaatcgcttgaacccaggcggcggaggctgcagtgagatgagatcacaccactgcactccagcctgggcaacagagcgggactccatctcaaaataaaaggatttttttttacaaaacaaaagaaattaattgtaatcacatattttatttaacctaatatattctaaatatttttgggtcaatatgtaaattgtataagggattatcagtcacgtgttttacatgctttgtccatgtgctgggtcttggagttggcgtacacttttcactctacacacgtcaactgcccagctctctcccgtggccggtggctgccatccaggtccaggcaggcacagacccctatatatcacagctgcctccctcacaaccacaaccccaagcctaaaagacaaccatttggccacatgtaacccggcatacggcagctgaacggtaaaggggaatatgtccaacactcagaaccgtatctttgcaagtaatgagtgattttccaaaaccaccaggagaccagcagaaaatcacctcctccacgccttactgagcatcttctctgtgccaggagcaaaggacgttacaggtgcgagtttgctacatcttcagagctctgcgaggccaatgctgccttcactgtgactccctgataaacggaggctcagatagggccgcccagaattgcatcagtggtgcacagtgaaaggacgcctgaaatgccaatgttcatcaccctctgagggtagaatttcccctcctgacaagcaggacccccttggaaccaaacaggtactcaacacccctacgtctctcgtggggcaggcttcggctactcagctactcggcacagagcgaaaccaaggccttcctgccaacttcacactccccccttcatcagctcctccttgatcagggcctccgaggaaaaggaataaacaaacaagctgataaacaaacagcgagcgaggtagatgaaacacgcggcgaagatgaagcatgctgggcacgttccaaccccgcggtcttaggtacaaagcccattaactcattagtgcggatggagtttgaattccacagcaccgtgtgattcttggctaccgtccagcaataattcagagctactggtcaaccaggaaagacacagccagggtgggccgaatggggcaagggtgggatgcagggtgggccgaatggggcaagggtgggatgcagggtgagccccctaccccccagagccagggtgcccacaagcagcctgagagaggggaagtcagagcagccataccaccaagtaagggaaactcgtgcctaggaacagaggggcttaaacaaccctcagcccgtccctgggcattgagagctcctttcccctgtgctaaggaggaggtaaggcccacagatagtcctgctgccatcctcacagtgaccctatgagtcaggcacttctgtgttgcaagagaggaaactgagcccagagggctggttggtgtggtccctggactgacactggccggtcactgtctcagtatcacttgtgtgtgttttcttccagccttgtggaagaaaccctgagatctatacaacggaaaagtaccagaatcagcccccaaggatgccatgagctcaggcgcgctggcacgttgggcactcgctgtgggctgactctattcaacacggtgattgctggtgttggtggaaggaggcatcgaggaaatacagaaaactgggaagctgtctccccagtcgctggggcactgatttggagaaggaggtgacagagaagcacagaatgaagaggagagaagagaaacaaagcgcagaaggatcaggagcccccatcaaggcttggagaagtccactcctcccgtcggagtaccccgaccctccatacctccctgccctgccaaccctgacacctgccatccacctgccccaccacacctgccccaccacaaccaccaggctccctgcagacacacctggctgccttccccagggctcagggagcaagcctgcatcctcaggctctgtctagtccctggagccgcctcctcgaagctcttacataactcgggtccttcctcacctcctgagcagcaccgccctccccccaccttctagacatgggggagtaacatctgctgtcctcactcctctccaagagaactccctccccaacacccgcaccccaaactcaaacaccgccaccctccccaaagcagcaagggataaaaaataacataaaataaaaacatgctaccaccaccacccaccacatcattaagggcaaaaaaaaaaaaaaaaaaagagaaagaaagagaaagctcgctcctacaaataaaactctttccttcttgttctagaaaaacaagaatgaatcctggggggaaggagcacaggaagggggcagacggggccgctctaccttttcatcttcattgctgagagcatctttgatatggcttattttgtaaaaagaaagaagtccacgtagatccttgtgcttgcatgcacgctaagagaaggtatcagaatcccgctctgggaagggcgtcgagggtccccattcccgccctctccctcgcccctgctagaggagcacgtctaccaggaaagaaggaaggggccagccgtgtttgggttttggatcaagaggccaggattagcctgattggaaggctccacagcaacatggggaagaagagaaaacagcctggctgaggagccggccacagggtcccaccggcgaccaccccatgccctctgcccttgcccctgcctggcctctccccacttcggccaccttggcaacactcagcctccaggggcccagagggagcggaggtctcccaggcctgacttggtgtcccaggcttcccaggtcgcttccttccaggcagccgattggttcaatgtctgccttcccttccaaacacttccaagaaaacaagaggggaggccttacttctttccccaggggacgctgtccaacccacctcctgttatccaattccgcctcccagctgagactgcagttccccttaacagtgtgttcccagctgtcctgagccttcaccaccctgctccaggttctcacagccaccaggacggttccagacatgcacactcagacacacccgtgcacactcaaccccgccagctcactcggctcactccatttctttggcagttctcatggggcatggaaggttctcctttgatcattcctatatagctaattggaaagactgtgtgtgtgtgcacgtgtgtgcgtgtgcacgtgtgtgtgcacatacatgcatgtatactactgcacaagccatcatgctaccacttggacaaatctcagatatgtggatacctctcgcagatttgcataatgacaaatttaaagcaaataatcttcaatggctataggtagatccagaaaggtcatagccacagtctggaccccagtagttttccatctccctgatctatattccacctgccaccactgatgaacgacaaccatgtagacccattcaggacctcagccgagagcccaaaccccaggacgctctcccaccaacacagaggatccagcttgacaccccagaaaggaagcacaggtttatggagcaccagccaagtgtctacagacagtctcccttttcatccacacaaacggccatcagatgaacgtcatcaccagtgccccactgctgaagtgtggctctgaataagcacagagccctatctgctctaagcccttgatttccagcaccccaaagagcaagacgactccctaaacagggttgatcgatggcttgtctgtagccccctccatgcccatccatctgacggcttcccaatggcctgtctgtagcccgctccacgcccatccatctgacggcttcccagctgcaccagaagcagcacatggcttggttccctcccattcccatccgccggcattcccagcagtaccttcctcattctattttttttttttttttttgagacacggtctcaccctgttgcccaggctggagtgcagtggtgctatctctgctcactgcaacctccgactcccaggttgaagtgattctcctgccttagcctcccgagtagctgggattacagttatacaccaccacacccggctaatttttgtatttttagtagaggcggggtttctccatgttggtcaggctggtctcaagctcccaacttcaggtgatccacccgcctcagcctcccaaagtgctgggattacaggtgtgagccagtgcaccccagtcccttcctcattctttagacccactactcagcaggggctctgctcagggacgaaaagggaaggtgggtctgagcctgacccttccatccagggctggacaaggagccctagggagcctggcaggtgaacaattaccttggggcacctgagtctgccctggggttcagagataaaagcatctttcaagccaactcccaagcgttcacttttctattaaaaaatcactcacgccacttttggaggccgaggcaggtggatcacgaggtcaagagtttgagaccagcctgaccaacacggtgaaactccgtctctactaaaactacaaaaattagccaggcgtggtggcatggtggcgcacgcctgtaatcccagctactcgggaggccgaggcaggagaattgcttgaatcccagaggcggaggttgcagtgagccaagattgcaccacagcactccagcctgggtgactgagcaagactccatctcgaaacaaaaacaaaaacaaaaaaactgttgcttgtggaagggacaaagagaccaagaataggaacttcaggagccaaatccccagacaagccctcctgaaccctctctcctcagaactggagctgagtccactcacccaaacaaacacacacccccagcacacatgagaattgtgtgtgcttcactttcggggaacatccactggggagaagagaccacagcatgtaccacacccagtccaggggctgccgtccagcacctgcggagaccagtggagcaggctgggggaggacgcgggactttagggggcagcaggcaggggccacaccacagcccctctccctggacaaggcttgggttgggtacctgggctgtactcgcacccacaccgattcacagccttagccaacatcccggcaccccagtgaaggactcggacctccagcccttcagtgggctgagcagccagtgggttcatctgatggaggccctgccgagggctggccatcccctgacctcctgggagaggaccagcttccctcctcaccctatcctggactactctgaacatttcttttcctgtctccacccatttcctcaaatattatggaaaaatcaagttcccaggcagagtttccactcaggtctagtgtcttctacctgggaacctcgcccagtgcggcacgggctgtgcctcccttaaagaaagggcggcaggtaggggcgggcacagctcctggtgcccccagctcctgctccgctcccggagtccacccaggagggcccagcctggctcacagcagagtttcagaggccaccagagcactggggtctcgggcctgaggctgccctctctggacacacccccacctcacccatgtgctcctggaacagaagggctggcttgcatctgtgactcccgaggctcggaggtccaagtcagcgtcctgcctgtggggaggacagcagcccccatcttctccaaagggcctggcagccccgtggcacggctgccaccacccccaaagcctgtgcactttatttctgcaggaagcgcagctgtgcccaggatggtggtatgaactaagaggctgtctcaggaggtccgagaagtgcagctcttgaggcagcatcagatgctggagaggggcccagctcaggcctcagtttctccagctgtaaatcaggggacattccagcctgtccaggcaatgcagcccactgccacaagacactcactaagtggagaacagcctgctaccatctctacaggggtgtgcgtgtccttgggcatgcgttgcatgtactgctgtagccccagtgcctgcttcaggacccggcatacaagtgctcgaaaaatacctgcagaatgaatatatgacagctaccttgtggcattttattttatcctcataaaaagcctgcaagctagcaagtgccatcactccctcgctagataccatggtaattgttgcagtaacaaatccatattgactgtaaggcactttgctggcataatctcatgccttcctcttctccaggctgtgaggtggtggaattgtggtcactagtttgcagatgaagaaactgaggctcgggatgggcagatgcactgaccaaggtcccttgtccccagggcagagcaaacaccagttataaccaggccaggctttgtctgcccttccaggaaggctagggaaagccttgccagcaagtgacagccacacagcctcaagattttcatgagtctctctgggctctgccaggcacaagctggccttactttgaagtcctaagggaggttggcggggctcagcctgcaggtaggagcctacagcagagaagctccgccccctggctggtcccagcccactcctctggggctcatccgtccggcacaaccccaggaatgagcagatggcctccctttttccactagagacagggagagggatgcagctccatagtaattagagccaactgcagctttgaggcggcaaagctaatgtttctgcagagacgtgagagcaagtgaatctgataccagggttagagaaccaaaaacatctttaaggatcataacaatgatttgtgtctgtgtcaaagtggggtggtgattccagcctcccacccaaagcggggctctggggacacccaggatgatgggggccctcagtggggcaggcctgaggccttcctgtgggcactggggaaggagacaaaggaaggcacagcaggtgctgctccccagtgtgagcctcatgccctgtccctctgggaaaggaatctgactgtcaccatggggccaaatatcacaatggagagggctcagcagctgtggtcacaggcctcagcctggtcagagctaacgttcaatcaagaatgtcgaatcgtcataaaaagtgagaaaactccaggctttagtgatatgatggatgaagcagtttacctaaaaaaccttcatgttctgggaagaccacacacaccaaaaaaaaacgtggacagctaacttgtagggcaggacgtgggcatgctgaccagccgtgccgggcaccatccagagctctcacgcatccctgagtcaattgctccctgttgggaccatcttcctccattttctgaggtctacaccgggacaacttccccagccagggccctgtcaggcctgtgaacctgaacacaaataggagaggtcaggcaggaacacagggacttggggaaaaagagcactgagcccagggaaacaagagggcccgagggcatcccagctcccaggggcatcaccctcaaagcttatgtagctttgatgtaaaaggggcagctccatgaagccagacctgttccatgggagccagtgtattaaccagctcaggcaggagaaatcatggaattgagagattacggtgcaaggaaggctaaactggtacagtaaaagggggcccagacatcagggagaaagtccagatgcaggtccacaagctcatggtaaggaagtacatcacacacacacgtctagtacccaagcctgggatggaggacacatagaccattctatggtttatttaataagtatttttcaaagtaccactacatgctataatcatttacggaatgacggaatgacaaaatgactaagtggatgaatagatggatgagtggacagatgatgggtggatagatgggtgggcagatggaagaatagatggattaaaagacggatggataggtaggtggatgggtagatggatgagtggatggaaggatggatgagtggatggaagaatggataagcggataggtggctgtgtggatgaatgcgtgggtgggtggatggatggatggtcagtgagtgggttgatttatggacagacagctggatgatactctgttgaaataaatggaagcaaatggacagaaataatttgactttgcaattcaaaaattctcaaaatctaggacttggtatattctacatcagtgccatccaatagaactttctgtgaggacaagaatgctttatacctgcactgtccagtgtggtagccgctagccccatgtggctactgaacacttgaaatgtaactagtatatctgaacaaaagaaattttatttaaatagtcgcatgcaactagtagttgctgcattgaacagaacagttctagagtttttcaacacaccttgctggtacttcctgggaggcccttgggaatccaggctatgcaaggccagttagaagagatgactctgtgagaagctgacaccaacatgagcagggcgattcccctctcccccagcccctggtttctgctgaacaagaagggaacttgcaaagccaggggctaggaaaatgcttttcaactttaacatgtagtataatttggatatttgtcccctccaaatctcatgttgaaatgcaatccccaatgttggaggtggggcctggtggaataagtggatggatgggtggatagatgggtcggtggatggatgcctggttgaataggtagatggatgaaaagatgggtggatggacgggtgggtggatggacgggtaggtggatgggtggatggatggacgggtgggtgggtggatggatgggcagatggaaggtggatagataggtaggtggatccctcatgaacgtcttggtgccatcctccatttgggtcatgggggcggatccctcatgaatggcttggtgccaacctcctggtaacaagtgagttcttgctctgtgagttcacatgagatgtggctgtttaaaagagcctggaactttctcctcatggtcttgcttcctctctcaccatgtgacactctggctccccttcaccttccgctgtgattgtaagcttcttgcagccctcactagaaacagatgccaacactacgcttcatgtacagcctgctcatggccaaataaacctctgttctttataaattactcagcctcgagtattcctttagagcaatgcaaatggactaatataatatgcatacaaagcacccaaaaattttgtttaaaatgcagatcctaaaattcagtaggcataggggaggactcaaacatttgtatttctaataagcccttacatgatgctgacgttggtccaaggacaatattttgaacaataagagttttggaggctttccattccagaaaaacaaggttttgtgggtagcagaatggaaagaccctagaagaccaagattaaatacagagaatatggcatagtaaaagaaaaattcaaatcttcaaaatttgataatttaaacaaattaatgtattgaaaccttactataggcctgtatgctatggaaaatgcagggagcttctgagctagtttaggttgcaaaataaacacatgaaaagttaaacaataaatgacttaaaataatggcttaaacatcacacatcagcaaagcctttcatggcccccactcttcacactgcaacctcaccctgactcctctcccagcagcataatttgccataagaatatcattatctaagttacaacacaattttcttattcgtttcccacctagaatgcaagctccagtggggaaggaatttctatctgttttgttcactgttgtatcaccagggcctgaacagggcctggtgtatggaaagcgctcaagtcagcaaatatttcttgaattataatgattccattgtaattcaagaaatatttgctgactttaaggcttggctccatttggagtttatcgaggtgtaaaaaatgttcttcaggattcttaagttttttgcacatgcattttgcacatttcttgttaagtttattcctagatattttatttttgttatcataaataggggccttttctcccattatattactgttgtaagacagatacatatatacatatggacatgcatacatgcatacataggattaccttgttggttgtagtagtttttcatggattctctaggattttccaagtatacaattatatcatctaaaaaagggtaatacttttagcccctcctttccaatatttattcttctcatttcttttcttgtctgattgcattggctaatgcttctgctacaatatgaaatagtagtagcaagagtaggcatccttgcttttttcttaacttcagtgtttccacattaagaaaaaaatgagttttgaatatgattacagtcacgttaagaaagtatcaatttatgttttgctgaatgtttatcaagaatggatgctgaattttgttaatgctttttcagtgttaaaaaagataatcgtgtgttaattctctttatattaatatgatgcattatataaacagatttcttcctattaaaccattcttgcattgctagaataaactccaagtaaacacagggtattattattttaagatgatgcttggatcctatttggtaatctgttatttaaatttttgcattgatatttataagtgagactggcctgtagttttatttttgtacaatatttgtcaggtaaaaaaaattttattctcactttaggaaaattacttagactttttcttctttatctttgctgtggaacactttaattagcattggaagcacctgctctttaaaggttttgttcaaattcccctgtggaaccattcagaccacaagctttgtgtgagagtagcttagaaactttctatcttccatacaaattgatcagtttggtaaattatatttctcccttattattcctcattatgtgttccttgggttttcttggggtttttttgtttgtttgttttcgtttttgagacagagtctctctctctctctctctgttgcccaggctggagtgcagtggtgcgatcttggctcaccacaacctctgcctcctgggtgcaagcgattctcctgcctcagcctcccaagtagctgggattataggcacccaccaccacatcctggctaatttttgtatttttagtagagatagggtttcaccacgttggccagattggtctcaaattcccaacctcaggcaatccacccgcctcggcctcccaaaatgctgggattacaggcgtgagccactgtgcctggctgctttcttgacttctaaccttgactatgtttgttagtggttcatctaactttttccagaaaacagcttttatttactagtcccatttttctattttgtggcccattattattatattagttcattaatggcttccttctacttttcttcagtgcattattttttgtcctttttctaacttttttgaatcataagcttaactgagttacttttgttctctcatttttattggctgtgaatttaaggctgtgcatcctctccatcctcactcacagtcacccctcacctggccctctccatcctcactcacagtcacccctcacctggccctctccatcctcactcacagtcacccctcacctggccctctccatcctcactcacagtcacccctcacctggccctctccatcttcactcacagtcacccctcacctggccctctccatcttcactcacagtcacccccgacctggccctgctggccctttcttcgtgggtgcttcgcaccccgctgtgagcctgacttcattgtgctgtgctgtttccactttgccttccccagcaggctgggctcctaggaggtggggaccacgtcctgctcagttctggatgtctagcacctaacacagggtctcacacatggaaggttttcaatatacatttgtgggaaaaattacagggtggatagtaattttgatgtaatatacaatcattataactctaaaaccaatatttgaatattaattctattccaggctctgtgttaggttctgatgagcataacttttttaatcctcagacaccaccatgaggtggggtttcctctccctcttttatggaatagaagacccgggcttagagaagctaaagacttctccaaaccatagaacatcaacggacagaactcagcctcatgaacagctaaaatgtacagtcacaaaaagcaaaggaaaccagcctgaggggaacaaagagggtccacagggcagggcagccagaacacaggcttgagtgtcaggcagacttgagttggaatcagatctgccaccactagctgtgggacccaaggcaaatagtttctctgtgcctcagatgtttcacctgtgaaatagggagaagagtatccatatccccaatggatgactgtaaaaatcacatgggtgatagctatcacatacccagcacaatgcctggcccatggtaagcactcgggaagtggtgatagtgatggccatggtggtggtggtagtggtggtgatggtggtgatgatggtagttgtggtggtggtgatggtggtgatgatggtagttgtggtggtggtgatggtggtgatgatggtagttgtggtggtggtgatggtggtgatgatggtagttgtggtggtggtgatggtggtgatgatggtagttgtggtggtagtgatgatgatgatgacaatgataatggtggtgatgacagtggtggtggtggtggtgatggtggtggtgatggtagttgtggtggtggtgatggtggtgatgatggtagttgtggtggtagtgatgatgatgatgacaatgataatggtggtgatggcggtggtggtggtaatggtgattatgtcagtgatggtggtggtggtggtggtgatggtgatgatagtcatgatggtggtgatggtggtgatagtggtggcaatggtgatgatggcagtgatggtgattatgatagtagtggtggtggtgatggcgatggtaatggtgataatggcagtgatggtgatgacggtggtgatggtgacgatgatgatagtaatgatggtggtgatggtaacggtggtgatgatgatgatagtggtgatggtggtggtagaaggcagtggcagcagcaatggtgttggcaacaatgacaacaattacattatcccagaactccaactacaacaatgtcaccaaaacccaataccatacagtgaagacaggccccattggaaagatgaatcaatgcccacagagcaaaagaaatggaagattctagaatgtcagagcgggaaagcatacttgcaatcatccagacgcaattcctccactttacagacggggaagcaaagaccaggatcaggagagcagtttacccaaggtctcacacctgctaccagccaggcctagagaagaccaagttttccaaaccaagctggtctccactcctccctccctgctgacccctcaaacaccagtgagcacttactctgggcagggcactggcttaggtcctgggaacccaaagaaatgaatacaggaaggggacgtcaggacataaggcaaaatagacagcagttccattcggtggcaggaggaggagtgcccgtgtggctccgtaaagcatttgaagggccgaggaggggacagaccatgctggaaacagggttgatggaggtagctctgcccaggccgcccacaggaaggcttacagggagctgttggggaggaagtgttgattttaacacaaatgagcgacaggaggaggagctgtaaccacatccagagtgggtggggagaggaaatcaagtacacaaattagggctgatgtgaaattaacggctacttaaaagactcgaactaatttaataactttgtcagtaatgaaaatatatgaactaggaagaaaagacgggcaaaatatttactggcaaaaggcaaaataagcaaatatctgagaaggcagcacatctatcaacgtcttgagatggcaaaattcctaggaagggagggactttctggaggcacagagtccaccgaaggggagcgtggggaaggggacagaatcaaggactcctcactagcaggggttgctgctgcccaggggttcaccctgtgtccagctggtgctcagggctttccacgtctgtctccatggtccccaaagaactctactgagaaactgacaaggctagtcatggtggctcatgcctataattccagcactttgggaggccgaggatggtggatcatttgaggtcaggagttcaagaccagcctgggcaacatggtgaaactccatctttaccaaaaaatataaaaattagccaggcatggtggtggacacctgtaatcccagctactcgggaggctgaagcaggaggcagaggttgcaatgagccgaggtcgcaccactgcactccagcctgggtgacagagtgagacactgtctcaaaaaaaaaaaaaaaaaaaaaaaaggaaaggaaaggaaagaaattgcccagagaatgagcaggtagcctggaattccaatccaggcagtgtggccccaggccctggactgttagtctctatctggtctgttacccctgcccacccacccagccatggagaagccaacaagggccaccctccaaaccccgagaaaacccaagtccagtctactcacagccaagcccccatcccacagctgcagtctctgagatgatggaacatttccaaagagaccacgtctggggccgtgggagcccggcggtggtggggggaaaggggggaagagtggcaaggaccaagtgacagctgcggatccccagcccattttcataggtgccaccaaattagcggctgttggtgaggccgaagaaacgagtctgaagaaatgttctgtgtgaaattggactagattggctctggtatcaacacaggcacaggctgagggaggctggacagccataaacaaaggctaacggcagatgtcagcgtatcgggcaggcgggggcatctcgtgggaggcctcctgggccactgcaaggccccagttttgtttaatatccaagctaatgatctggaagacaacagacaggtcacgagcaaaacctgccgaggacgcagggggtggcgctgcggttgtttgctggggcaaggggacggccgggagacagaggagacctggagggaagataagtagctcccaagtaaattgagattcagcttgaagaaaaattacaaacactcaaatctaagaggagaaaaaagcagcctgaaactgctattttctgagccgaggaaacccaggaagcagggagaggggacagactcagatcatcacgaggtccatcgcagaccagcttgtgatgtcacacggggagggtgatttgtgttttgttcactgtttgggggcaggaaagacataccctcagaggagctgagagggccacgtggcccaggcccagggatctacctgggtggccgcctttgctctgaggggcctggcgcaggagcaggaaggaaaattggagttcagaaaaatatttgctaacacagagagagtgagagccaggatctcccgccctgtgtgcatgagagccaacccagtgtctggtgactggcagacagcagggaaccgtccggagggtccaggcgcagagaccggctgggggcagctgaggggcggggctgagggccccagggtgctggcggatggggaggatcttccaaagcagaaacaccagggcccacacttcccggctgcccaggagggaggcaagaccacagtcaggaccagccctccaaggtggcttcgggcccctgaacacttccctcccggccgggctccatgcactcactgcttgagaggaaaccaaaattgtcagcccggacacatttggaaatttactggagcagccttcccctgccttgcggggattgggttagtcaacctgttaaccacatattctcaccacccacagtgcgcggaggctgcgtgggcctgcggggagcaggagggagagaggagggaccgaggccagctgcacaagaaggacattgacaatggtggggggtgtgccaggggatgcagggccagcatggagggcacagagaggcttgctaaggagcaggacccctgtggcccagaggctgtgtggattcaacgtgggcaggtgccctcacatagcaagcatttaccaggcattgtccatgccaggtgctcagctgaggggcagcagctggactcctgagagtccccaccaggagaccctgggagccctggccaggctggtctcgggcctgggaacctcagtcttacacgggcagcagcactgatgacctcacaatctagcacattaattgttctcactggaatagagctccctgaggatgggaggggcgggggttgtctgtctttttttcccatgattgtcttactggtgcctaaaataatacctagcatgcattaagtgcttactaattatttatagaatggatggatgggtagatggcaaatggtgggtcatggtgggtggtgagtgggtggtggatggtagataggtgagtggcagttgaggtggatggtggatagtgaatgggtggatgggatggatgattggatggatgggtggataagtgaatgggtgaatggtaagtggtgggtggtggatgggtggatagtagatgggtaggtggatggtgactgatggatactgcatgatggatgggtaggtggtggattttgtatgggtggatagtggatggtgaataggtggatgggtggatagatgaatggtgggtggacagatgggtgagtgggtgggggggtggatggagagtgatgagtgaataggtagatggatggatgggtggatggtgaatagtggatgggtggatggatgggtgggtgggtggatggatgagtgggtcggtgggtggatggatgggtggatgatgggtggtggatggatgggtgaatgaatgggtagatggatggatgggtggatggtgaatagtggatggatgggtaggtgggtggatggatgaacagatgggtgggtggatgttaggtggtgaatgaatgggtggatggatggatgggtagatggtgaatagtggatggtgggtaggtggatgggtgggtgggtgagtggatgaatagatgggtgggtgggtaggtggatggtcggtggtgaatgaatgggtggatagatggatgggtggatggtgaacagtggatgggtggaaggatgggtgggtgggtgtatggatgaatgaatgggtgggtggatgaataggtgggtgggtgggtggtgggtggatggatcttgtgacaccccgttgcatcttcagcaactcctagaaaatcaggtccaaagtaacagcctcccccacccaccgtcaatctccatcccagccccaaaagactgagtgtagaagtgactgggctgaaatggttgctgggtggtcaccgagccagagcaaagcacagggaaaggctgagggagacccgaaaagcctaagaatgcccagctctcacatacacagggatactttgcgaactgcagagcagagaacccatgcaggtattcatgcttcattcgccatcccactgcaaatgaagtgccctccctgtcctgctggcggaaggtgtgagagggcaaccactttacttctccttgactgtagcctcaggaccagtcagaacaggtactcaagaaacagcaatttcatttttatgtttaccaggacggtgggcacctaatgagcagctactgcccacccgaccatggcgtgtccaggaacattgaagaatacgcactccagggatcatggggttcagtgacttatgttccagcaccaactccccacatctaagcctgccagccagtgctgtcacagcaacctcacctcaccacagccagaacactcgtggcgggaagccgttcagtctccatccacagatgcccccacccacttccccacccatgacagcacggccagcgcgagagctgcagctgcaggtgcttcccgagcttcagcctgtcactgggtggcatgcggaggacttcacctgcgtcctctccttttctcagctgccccagggggtaggaaggatgcttggtcccatttcacagttggggaaacggaagctcatggggattcaataacttgtccaagaccacgtgtgtaataagaagtgaagccagcatttggaccccagccaactctatgggccaggctccccaccagacagagctgggggcgcctggcctctcccacaatcagctgcaccctcaaaggaggatgtgttcacaattcaaacaaatagaccttgcactacagtgagtccaaaagaggagtctcaaaatctttagagatttggaacagatgcttagaacttagtaaggtgactgctttgcaaagggtccttttgccattttaaaaaagtcactaccatgtatgcccctgggggcttaagttcaccaccgtgctccaagggttcaaagggagtgtcaggggtgccagaaatagagcccagccttgccagggctgagcagccggcaagcccagcttccaggaagaaacgctggacagtcagcccttccccaggctctccaaatcctagacctccctctgctccagtcacccccaaggattaagggtgagcagagaccaccactgcagattcagatgacagagagcaagggtcgccaaactcaggagtccccagagacacacgaacgaggctgaccccacaccccagctccacgaggccactgggtcagcgcctttccatcagccgatgtcaccgctgaaactgaaaagcggtgcgtgttggtgacagcagtgagtgcccagtgtatgcagacccctcgaggcaagcaccacccagctgggcactgaagcaggtgtcctcacagcaaactctgcaaaaggagccctcccttcatcccggcccgagtcacagagcagcaaccagcgtcctgagggcagccctcacctcttcccaagagaggggcacatgagggtagggacttagacccaaagcaggctcaggctcccgtccacacctgtgtctggtggggacgggcaggaacgcccagcaaagatgtcatccctggcatcagggggagggacattgggcttcccatgcatggtgctatgagtcccactgctgggtgggcagcagaagagatgggcagcggcccacacagctcacctcatggggacaagctaatcactccattccaaaatgcaagctggcagccactcagcagccaccaaaggccaccaaaaggggcagaccagtacgtctgtgacatgcattagcaaattcattagtgaaattaattctccccctaaacagctgagattgtgttaaacaaagccttgtagaatggttcgtggactccttttttctttattcctgcctgcaaggaatagcatgccggctgagactactgggaaccgggaatggaagtcctgagccctcacccgagtcggcggcttccccatccacacacggagctgagtgcctctagggccagagtcctgtggctctctccgccgtccatctcctctcttgagtacttgagccttgtctttttttcttcctctccccttgaaaaatcaagtagcatgcatgttgggtttcgctggatgctagagattagattgcatctgtctggatataaataatttactgcttgatggtcagagggaatttaattagttcttgttctcctgatagaatcagcccaccattgctaaaacatttcactccgaattagtctgaaaggggccaacaaggcaatgctaattttatacacatgacgtcccccgcagcttctgaaaatacacatccagcacgaagtaccacccgggctgttgctgctgccgcttcggtgtctgggggcgccagagaaagtccatggagggtgggccccggccccggctggagataagggaatcggggtaggggccagaaccctgctgcctgccacatacaaccttctcctcccagctccagataaaaggagcagggaccctaatgacatgatgatcaatgagtccacggggcccaggtaaggggctcgtacccaccccaggaatccagcaggaaagactcgacagagctgtgctgggattttttcccctctgcagagcacggctctgctggacgcctgcctcccacctgcctagggaaatcacagctcagatgaaaacctggagatgaggccctgtgccagccagcactcgcccactgcctccgcctggcccctgcgcagcagcagagcgggcggggggagcaagaaggcctggtttgtcctgaagttccctttaggaacatttgaaatgaagcggatctcagaaaacaagccaacaggatcaatagcccacaaaaaccaccaacaaaaggatgttttaaaatgtgggccaggtagccaacgggtctttgaaaaaaaaaaaacaaaaaaacaagaatctctaaggaatgttcaatgagaaggaagaggatgaacaagccagaggctgactcatctattgatcagactgtcccttcagagacagcggcctggtgaggcaggaaatgaaacgcctcgcttccgtctgcaaggaaagggcaggatccctacgccccactgccctcagcagccccttagggggaagatgaaggcagccacttctcagcatgtttctctctctggcctacagcacatttgatttcatggcatgatttaaaggagtgcctgtttcaccacaaccttcccagcattgtgtgttagcattttttaagtctttgctaacaatctgggaaaagaggtgttacgttgttgacattggtacaggtttgattactcgtgagatgagtttcctttccatatactagaggagtagaataggtcttctcttgctcttttttcttggcacattcttttcctttggagttaaaccaatccatcttcagtgccttgcctgaatcccccactggccgggagtctaggtctgagggcgtcttgtcgctatttgcttgtgcaatacatgttctccacccacagagctggcatttaataaatatttgttgggtaaaccagaggatggagttgaggaagttctcccatgagtcataaaagcattcttcatatagacaaaagcaacaagaataatgattctaagaaaaatgtctcccattaagtgagcactaactatgctacgtaccctatgccaggctgagtaccctgcacatttcatggttttgcttccccactgtgacactcagccccaaaacagatggaggacctgcagcttctttggggtcagtaccttacccaaggtcacacagctaaggaaagaaccagcatttaaatcaggcaaggtggcttctggctttgccctgagccatcctgctctccccgaagcccaaaccatcaggctctttttgccatgcagctcccatttgacttcctttcattcattgaacagtccttccctatgcactttgagccagatgaaacagacaaggttcccaatagcagcaaacccaaaatggcattaatcgtgctgggaagaaaaccaggagctggtgtagtgggaacctgcctgaaggggcaacattctcacctattaccttggtgaaggtggcatctagggataatggccgagctggccttgctggctggtgggggctggtgtgcacatcttaataggagccgaaccttcctggaggacgccttagcagaacggtgctggagcctcaagaacatttatattccttgacccaggaattctacttctaggaattgatcctacagaaataatcagaggcgcagaccaagatttatgtacaaggaagttaatcacaggattatttataacgcagaaaaaaactggaaacaacccaaacagccgacagtacaggaaagaggaaacaaattatgaattttggggacatccacaccacagactagtcagcagccactgaagtgtgtggttgtggtagaagctcggtggctcacgcctgtaatcgcagcactttaggaggctgaggtgggcagatcacgaggtcaggagttcgagaccagcctggccaatatggtgaaaccccatctttactaaaaaatacaaaaattagccgggcgtgctggcacacgcctgtagtcccagctattcagggagctgaggcaggagaattgcttgaacccgggaggcggagttgcagtgagcagagatcacaccactgctctccagcctgggcaacagagcgagactctgtctcaaaaaaaaaaaaaaaaagagtgatgcttaccttgtcatattaagtaaaaacagggtacagactatatataaatatcattctaattttattttaaaatatgtatttttttaaaagactgctaggaaatataccaaaatgttaaagtagttatctctgggtgggaagattaaggtaaggttatgattgatttttgttcccatctctaccctcttctgtgctttctctactttttgcaaagagacactatttactataagcatagaaaatattttttaagaagcaaacaatacatttaggacatcttttttttttttttttgagacagagactcgctctgttgcctaggctggactgcaacagcatgatctcagctcactgcaacctctgcctcccaggttcaagcgattctcctgcctcagcctcccaagtagctgagattacaggcatgcactaccacacccaataatttttttgtatttttagtaaagatggggtttcaccatgttggtcaggctggtctcgaacccctgaccgcaattgatccgcccaccttggcttcccaaagtgctggggttacaggtgtgagccatcatgcccagcctagcacatctattttttggcaatagaattcattttggagtcttacttgattaatcaaagtccttttaaagtagggcataaagatcttaacataagaccctggcagtgccctatctgagaaagggtagagcagggtctcctcctttcttctgcagacaatacttctatgaatgcaacccaagaccactctgcattttggatgcagctctgtcacactgctggctcacgctacagcttgctaagtcatacatgcaaccagctagctctgtctcaccatcacaggcttggagagcttggctatttggaccccagtattttgggttctactaaattgtattttgctagcttcaccctaccattctgactgtcgagatatatttagatcctaagcttgtctacgaagcactctcaccaatccttccagctccctgtcatcctcggatttaataactctgccacctgcgccccatccgagacatcagcagccacaaggaacagggagaaggtgctgatagagccctatggcacatctctagagacctccctctatgtttcttctacttgttaatcagctttcatttgttattcaaccaattacgaatgatgaatgagccctccctttgcgtaagcacgtcttgccatagtccctatttaagcctcaccaggctgggcctggggtctccactcatccactgtaagaagcggccagcgctaaagagccttcctcagtagctccgtccttcatcaccatggtcctgcagctccagggggactctcaggtgcatgcaggaaaactggtaagaccagctttggcccagcaccgcatccatccatgtgctgtgcatcctggggtgggccaggggacgggggaagagctgaggtccacagcagatcctaaagccaaaccgccagaaccccagtccttccatgctttgaggaaagtcttgcaatgatggacagaatcagccagtggagatgaggctgtgctgggtccccaacaacccaggccactccagccaagatgctgacctgcctgtgggcctagggcactgtggttgccctcaaccccagaggcagaagccttgcttgccactgttcataaccagtatctgtggttcattcgttctgtgggacatccagcaccttcagccgagcattgccccagaggggacacgaggcagttacaatggctgggccctggcacctgatgggacaggtccaagccccatccggcaaggcaagagtcaccagcaatttgcttcacttgttcttaagcaaattacctggttcatgtgcacctctgttctcttctttgtaaaatgaggtcacaataaattcttgttaatggaagtcaccctgcaaccgaggactcactcctcctatctagctgcaatttcatgtctgttaaccaacttcctcccatcttcctcttcccgttctccttcccagcctcagaatcctctctgcttccatgagctcaactcttttgagttcccacgtatgagtgagaacatgtgctattttttttctttctttctttctttttttttttttttttttttgagacagggtctcactctgtcgcccaggctggagtgcagtggtgtgatctcggctcactgcaacctccagctcccaggttcaagcgattctcctgagtcagcctccctagtagctgggattataggtgcccaccactatgcccagctaatttttgtattttttggtagagatggggttttaccatgttggccaggctgatcttgaactcctgaccttaagtgatctgcccgccttggccttccgaagtgctgggattacaggcgtgagccaccgcacccagccaggatttacctttctgtgcctggcttatttcatttaacatgacgtcctccagattcatccatgttgccataaatgacaggtttccctgatttgatcattacacactgtatatatgcatcaaaatattgctttgtatcccataaatatgtacagctattatgtgtcaactaaaaataaagggaataagtaaataaataaactaggtgactccttgtccgtacctcttagggctgtcgtaaggatttgctgagatgctacgtgccaagttcctggcagggaagagcgatctttaacagagtccttgctgggactccatctccaggctctccaagccagggctagccaagtcaaatcaataaagaaaaccctcttttcttccaattcaacacattcagaatttgaaaatcaatttgaaattcatataaaagaacctgcctgacctttacctctgcactgtctattaagagatggtttgcagaccaaatcaatgatgtaaagtctcctggaacccttctaggatgctcccagaacagcatgggtgcccgctctccagtgacagtcacactgcgtgtacttgcgctgggtacttcttatcttccagagcaatagcctgctggaaggagtgcgggctcacctttccctcacccctgccagcccccaagctggggtgacacacatctagagtacaaagactttatctggtcttggaagcaaacatccaaggcccccactaagcaacactatgctgtaaactcagtaccgataccacaagcaagtccatgtgctgagagaacagagaaccgattccttttatcacacagcctgagcatctcaaatctgaaaatccaaaatgctccaaaatctaaaactttgtgagcactgacatgatgctcaaagcaaatgctcactggagcattttggttcttggatttttaggtttgagacactcaactgataagtataaagcaaatattccaaaataaaaaaaaaatccaaaatctgaaatacttctggtcccaaccatttcagataagggatatgcaactggtaggcaaacttctgctggttcccctgactcccaccacaactaaagctgggggtaatgccccttcttcaatgtttctccagtgctgggggccacccacccacagcaccctcgatacattccaaagaggtgattcctcctcatgagagcctgggaagactcaagagacccccatgccctgtatggtgaaaaaaggctaatttcccagctccgcccccatttaaaaaatccttcgctctgaaggcgactggttggcccataagccagattcctgtgtcccactcaccaccaccaagggcaaactggccagacccccaggacctgctccgtggaaagcacctgagtcagcgagacccctgccgccccacctcccagagctccggacccagtgaggatgtgctgaggggtgatgggggctacctccccactagatgcttaggtatctgccttctcctcaacccacccaccttgagaaatacccccactagcctctcaggtaggtttctttattcttgttttaggggattttttcattgtggaaacatctatagcaagaaaaaaaaaaaaaccttgccatttcaaaccatttttcagtgtacaattcagtggccttaattacatatcaaatgttgtgcacccatgactatgacccacttccagaacttttctatcaccccaaacagaaactccattcctattaaacaatagctccccactccccccaagccctggcaaccactcgtctaccctctgtctgtatggatttgtattccagttatttcatctaagtggaatcatgcaacgtgtggccttttgtgtctggcttctttcactcagcacatcatttttagggttcatccatgctgtagactgtcagagcttcattcccttctatggctacgcactattccattgtgtggatatactacattttgtttgcccactcacctgttgacggacatttgggctgtttcactattgtgtggtgaatgatgatgcagtgaacattggcatacaagtatctgtgtccttgttttcaattcctttgggtatatgtcagtagatttctttaatctgccaacctgcagattaaacctgcagattaaataaatgctaacgtgcatttattccatttgctgttacttagcggggcctgctgcaaacattgtaccagatgcaagatattctggtggccaaggtcaacatctaagagtgtttggatggatggaaagatagaaaatcgatggatgatggataacagatggatggtgtatgaacagatgaattatggatggatggtgaacgggcagatggatagtagagaaggaatggacagatggattatggatggatggataggtagattatggatagatggtagatggatgaatggcaaatggacagatggataatagatggatggtagattgataggtggattatagatggatggtagatggatggatggatagatgagttatagatggatggtatatgaacagatgaattatggatggatggtgaatgggcagatggatagtagagaaggaatggacagatggattatggatggatggataggtagattatggatggtagatggatgaatggcaaatggacagatggataatagatggatggtagatggataggtggattatagatggatagtagatggatggatggatagatgaattatagatggatggtatatgaacagatgaattacggacagatggtgaatgggcagatggatagtagagaaggaatggacagatggattatggatggatggataggtggattacagatagatggtggatggatgaatggtagatggacagatggataatagatggatggtagatagaagatagatagatggattataggtggatagatgggcagatggataatatatggaggatgaatgggtggacagatggatggacagacatcacagccacgttgctcctcccttccccctactgactggcacagcagcagtctaagaacttctgagcgggcctgccttcatttgtctcaaaccttgtctgtatctgagtaatgtttcccaccaacagtgttggctgccactagctctcaagccctcctgtcccttagggtcacctggacagcatttccaaagtgacacttacagaccccacccctggggaccctgactccacactctagggtggagctcacagtcagtgcttttcatgaactctcgggtggctcaggggatcggccagggctgggaacccctgatgcagggctcacatctttccaggagtgggcctgtgggccgggctgctttgcatgccttgcaatagctgtgggttgcttttaaaaaatagaatgtcatgtctcaggaaggatgaagaaacctgtaaaccacagataagagactcttactgaaggatgagggggggcccccgggagaaaagaattttttataaaatagagtggcagggaggaggagtgaggccaaaaatgctgcaatgaagttaatctattaggtaattattgtaatgccagttccacgtccccggccctggcctagctgtcatttaactcgttgaaaaggatgtttctcattactggaattttaccctttggactaacaatctggtagcatcaggcattcaagattcttaaggaatcccagggtcccctagcatctctgggttcttgaaagaagtcagcattgtggcttccaaatatccccaaatcaagaaaatggcagagcctgccctagagccagcagattatggtccttgctgtacagctgacccctgagcagagccctgacctggcctctgtcaagcctggctaggacaggctacggccaggcctccctctcccttctgcctatgcctgcgggtgccatatcctctccactgccagcccagagtcttcctcgaggccccatcataaaagaagtgtcataagtgtttttcatctgcttgggtgtccccactcccaccccccgcccccccaaccactctcttccatcacagaaattcagatttaaatggaagtgtaccaggataatttgatcaggttgtcttaaacctggagtctcatatttgtgatctacagttttaattaagctttgaatctccactgcaggatctcacgttatcttgctgcatcgcaccaagcaagggtggtgggtcaggacgcagccgacctggccaagactggatgttcgtgaacttgctgcagggggtctggcttcctcttcctgctccttgagtagactctaatccaaggatccctcaaggagggaatgaggtaggcaacaggaaggcctgtggtggcgacaatagaatgggcagaagactgtgcctatgagcaccccgggtgtggcctgctcacctccccccagcgtcctatctcactgccgacccctcacctgcaggacttttgtcataagaaggtgatttgctgggagccatcgggtgcagacactacctggtgctaagtattctctcatttaaccctcctgggcatcccgagaggcgggtgttattatcactcctcccatcttatacacggggaaactaaggcatcaagaggctgtttgacttgcccagggtcacacaattagggcagtggggactgggctgggattcaggtccccctgcagcctgacacagagcccctaacacacctgctgcccagaccatggtccatttggtgctcagaccagggcattcccctgcccctggcagtgagtctttagggcagcatcgccccgccacccggcttagccatccctgaacccacagtccttggggcacctggagtggcttctcctcaggcaaggtccctgtgtccaggagctcattgtggccccagtgcctaacacccagcaggtgcccacccaccatgcacacccatggatgaagccgaggccgatcccacccctcttgccccttctcccagacccctcccaccccagctctgcccaccaggcctccctggtggatcctgaaggccttcagccctctcaacagggtggggggagggagggggaaggggagccaagctgaaggcagtgggagctgagccctttccccggaggtggccccaggtgagtaccacagtcttaagtatttattaacaaaggcaggagggcagccagcctgtctgattactttatggcctacagcggtttgcaaacgtgcgtgtttcccaaggctcattgtctcacagcaaagacctggggaagctcagctgctcattagggctctgaggaccagaataatggccacgctgcagggacgcagaggctggccacccgtgctgccctgaggtgccttccggattccccacccaccctcaccccatgcaggcttgccaaatttggcagataagacagcatagccagtaaaacactaattccagagagaagacaaaacaattataggataagtatatcccatgcaatctttgggacacactcatactaagcaattattgtgtatctgcaattccagtttacctgggcgtcctgggtacacctggcagccctgcctctacggcacctgacacctttcctgcttatgcctcaggcatttcctcttctttctgtcccctctccctgaagattcccagaggggcaagagccaagcccagccactctagaagtcaccctctccagagcgcagcagcagagccactggaaatacttcctccaagcctgagacagatgaaaaggagagaaagaccaaggccacggggaacaaaggcagagggagctgggcatcgagactgggctctggaaggagctgcacgcagcactgcatccacacacacacacctgtgggacgactctgggctatgcagtccccagccgtgctttgaggcctttcaatcttgcaggacctcgtgcagcctggaggaggggcttccaggctgagcactcggagcccacggccctggagacactctctggtctgcagaggggctccaggcaaggagagaggcccttcaaggctttcaccctgacttccccagcacgggaagaacaggcacctgtccctttaacaagctctctccatcctacagctgtgaccacttgatgtgaatgattgctgctgagaacctcatctgggattttccaatgcgatgattcaagcctagctgtgttcaaaaacctccccttccgccttgccatcttcctctggaatgttctgtcccctcccctccccccggcatcacctgcctccaatctccatcctacttggagtttttctctctgaatctgcccggtggggggagggtgcctaaagcagagccacgcgggcacgttcaccagctggagaaagacaatgcctccttctcctccctggctcaggacaacattctctaggaataaactaaactgcggaggtgggaaaccaggcggggaggagaaaaacagaaactccagcgtctccacccatgaagaaggggtgcgagcccccaggggtgggctgcccactggagaaggtgggctggccctcaagggagcaggtcagcaaggaagggatccaaaaggagaaatctgaggggttgtttaaaaagtcctcacggagaagttacagaaggtggatcttcatccctctcaacccttaggattaagggtccccttgtcaaagggaggagggaatatgtcagcggcgtttgaaccagagcaactccatcttgaataggggctgggcagaatgaggctgaggcctgctggactgcattccctggacattaaggcattcttagtcacaggatgagacaggaggtcaagtgatacaggtcacaaagtcccagctgctaaaacaggatgcagtaaagaagccggccaaaacccaccaaaaccaagatggcgatcaaagtgaactccagtcatcctcactgctcactgtgcggtaattataatggattagctgctaagagacacccccgccagcaccatgacagtttacaaatgccatagcaacatcaggaagttaccttgtaccgtctaaaaaggggaggaaccctcaggtccgggaaattcccatccttcttccagaaaactcatgaataatccaccccttgtttagcatgtaatcaagaagtaactataagtatactccgttgagtagcccatgccgctgctccgcctatggagtagccattcttttattcctttactttcctaataaacttgcttttcactttaaaaaagaaaaaaggcttcacaggttcgctgagtgagagcgtggtgagccactgccacgctggtgccagagacaggccagggtccagcctcccaggtggtacccagagccctcctcaaactgtcacatgtcccccagccacatggggatctcattgaagggcaggttctgagtcagcaggtctgggccaggcctgagtttgcatctctaaccagctcctgcgtgatgccgctgctggtccaaggatcgcactttgagtggcacagtggttcccaactttgagtgcatactggaaccagccaaggagtttcaaaatgactgctgccctggggtctaccccctaggttctgaaggcagcctgggtatgggggctgtgaagccccccaggcgattccaacatggagcctgggcccagaacccctgatctaagaggaaaggcgctggttcaacgcacacccagcaattagttatgaattacagcatggatgtcctgcagacaaggacaggtatgaaacgctgtgagggcatgcaacagggaaatgggggctcttgagttaaggggcaggaacgagtacatgggataggggggcagagtgagggagacaaaggggccactttccagggccctgaggccagggaagacaaggtgctaagaactccgggaggccacagagctacgatggaagtgggtcgaggtgcaggggcagccagcagggctgggggacggacctcatgccataggtaggagctccatcttccaaaagccacgggaagccctttgaggtgttttgaatatagtagtgacaaggtcagccttcggcttagagaaaccggttggagggaagtgcacaggaagaagaaggaagacagtcgtttaagtccctgtcactcaccctttgaaaaagctattctaaatgaggctaaaaattgaacaactagggcacctctgtcttagcactaaacatggggtcaaggcacttccgacttctgagaaagagctaagtccttgcccggggcagcctgccagagcaaatctagccctaggcccaacacatgctatttttagtctggcccctccccataaggctgcaaattatttcatggtattcctgtgatagtagcaagcccaccccctcggttaggctgaaaccactgatccaaaccaaacttccaagcaaaagtcgccagtcctgttgggagcttggagggatgctgtgctggtcagtgttgtgtccacatggccaggccatagtctctagggattaagtccaacatgaatctgggtgttgctgagataatatttggtcgttgtggtgaacatctacaatcagctgccttcagtacaggagatgagcctccagaaggtggatgggtaggtcccaaccaatcagctgaaggcctgaagagcagaaactcaggcttcctagagaagaagaaattcttgcctgaagactgaagcacaaatcctgcctgtcctaggaatttcagacttgccaacacctgtaatcatgtgaacaaattccttaaaataaatctcttgatagatggagatatggggatggagatggagatgatgaagaagatgaagatggagatcacagagatgatggagatgatggagaagctggagatcatggagatgatggagaagatggagatcatgaaaatcatggagaagatggagatgatgaagaagacggagatgatggagaaggtggagatcatggagaagatggacaacatggagaagatggagatgatggaaaagttggagatgatgaagaagatggagatcatggagaagttggagatgatggacatgatggagatgatggagaaggtggagatcatgaagaagatgatggacaggttggagataatgaacatgatggagatgatggaggggtgggagatgatggagaagttggagatgatggagaaggcggagatgatgaagaagatgatagagaagatggagatcatgcagaagatggagatgatggagatcatggagatgatggagaagatggagaccatggagaacatggaaatgatggagatcatggagaagatggagatggagatgggtagagacagcctactggttctgtttctccagagaaccctgactgatacaggtgcccacagctctggtcccagacacttgtagtcccctcccacctggctatggcttgatgtttcctgctgtccacctttctatcttaaaaatggggttcccgagagccccaaaacccagaccccaaagacctgactaggatggagggggattactcaagcctatagagcccacacacagacgactcacagcatggaggtctcactctggactcttcactctccagacccccatcccagccttgccctcaaaccccaagaagtgatcttggctttgatgaagatggacagagccagtgcaggacgtgtctgtcttccaatgaccaagatctaaactttccaaaagctagatttccgacaattctggctagaactgaaaagtagtgggtgagtaagacattggagaacctggtggggtgcaggatcactgagggagtcaggcaccatgaacggggcaaatggcaccctccatggggaagcaacgaggccctgaagatggaagaaagtgagcaattcttcacacgcacgggcagactcaattcggcaggggaaatgcaccagaggaaaaagcagcaatgtcaaaaatgtctctaagcttgattgtttaaacacttatcatcaaacttgaagaaataaactcaaaggccattttaatgacatacgcggggacaagaaaagcatttgtgtttccagtgccaagttcccttgcatgagcgacagaagtttctgcaagtacagtcaaaggtgatgggcgcacactttgccaacaaagatcccacttccaacacacacacgtctgtggcttatcattgctgacttgtttcagaattggctccagctcccgaagcaggttgtcaacccacctcctccctggaaaacccaaaggagaaggggagggagagaggtggaggggccagggaggccagtgtaggagaactggggtacggtcctctctggaccagagcagcattgagcaccctttgtgaaaagctcggcaatgccaggctaggtccccctggtgcgagggtggctctgaaccactgtcacagaagatggagctcaggggcccgtgcagacccagcgtgggtggcagtgcccacaggctcctaaaaataagcatccgttcagctcagaaccctgctgtccctccacctggccccagagtgtcctcacttcctcggcctgagcactgctggctttccggatgggcaggaggcagagctgagcccaacctggggtagtggtggagggaaggggggtggcccaaatttgtccaacagcaaaggccacctggagcgcttctcttacccgtgggggattttggcgatgccgggagcaaccacaaagcccggggaaatcaggagctttgcaacaaaacccgctctggggagcatcagggcactcaagccctccaatacctttccccaaacagcacatggtcaatcaggaatgcaaaataggcagcccatcagatacagagcaaaaccaaaccgaggcagggtgcccactgcctggtaccccttggggcaggctccctgcacatcctcttctgtgtgggcacacaggtgccgttctttggggaggtggctgtgggtgtatgcacacagtacccactcaacccctgatgggcttgtgccctcccttggaggcaggtagatgaggtgaaggcctggacgggccggccatcctgagacccgctccgggccagggacctgcacattcgtgcaccttttccgcatcctcaacagagacccttggtctggatgctgcgtgaattcacaacatctgtctgtgggagaggaactccctgacttggctctgaaaaaataataataaaataataaacatttaaaaggaagtgcagcttcttccaggaagccagaggtgtgggtagctggtgtagggtttgcttggcattgggtttggagcacagcagatcattccagaattccaccattctcctggcacagggtctttgcccagggctgacctcagggctcgctccatcaccgcatgaccccagtggcacaactgtggttacacctgctgcaaatgccctggttagttacgttctctaagacgcagtggccttgactcagggtggctgcacttcagactcagcctcctgccccctcaacgtcctgagcatcgtgcttggtccatctcccatgcgtctccgtcgcgttccctcttcccttctgaacaggacgggcctttgtgctgttttcttcctgcccagctctgcttcccactcctgcccttgcctaattgttctccatgctctttgggggaacctcgtctggtcctgccctgtggggaggcacagacccgactgggctccctgtcccctgcccgaggcagcccagtctgacatgcatgctgcggttgacacgggtgctggctctgctgccgggtgctggctctgctgccggccgctggcccatggctcctaccagaaaagcccacatgggaggcaacatcacatcagccggtttgctccccaaaaccaagaactgcaccccgcttttggccttgatattcacaggtcattttccttggatactcaggaagattctgtcttgcagaccatctccacaaaacgtggccctgggacctgctcggggcagggcagaggggtcggcaatgctgaggcaaggctgtggagaggagagcatccagcacgcgcgagtgatgaaggagaggaggaggcaagctccggggctggcgggagctggagaggacaggctgggagccatcaggagatggagcagaatgtggtcaggtggctcaggcatccactgagactcggcaccatggtggggaagtcactggcgccatggtggggagtcactggcgccgtggtggggagtcactggcgccgtggtgggggtgtcactggcgccgtggtgggggtgtcactggcgccatggtggggagccactggcgctgtggtggggagtcactggtgctgtggtgggggggtcactggcgctgtggtggggggtcactggcactgtggtggggggtcactggtgctgtggtggggggatcactcgcactgtggtgggggagtcacagggttggggagtcactgggtcggggagtcactggctgccattcaccctcagttgtcatctctaaaatgggaactggtgccacagcgactgcactcagctggtccctccgaggtaactgcacctggtaccttcccaatctcatctctgagaacttggcatcccagtcccatctcctgagtgccccttgggcttctgtgctccgtcctcccaccatggctttgcttaagggtttgtcttacctgcagtccacccagtccctgccccagtcccaccatcattatcatctccatctcctcctcctcctccccccgtcctcctcctccccccccatcctcctcctcctcctccttcttctcctccctctcccttcttggattatccagatttgatctatcagccaacaactccctcatcccaccccgagcaacagcatgtcctatcttttcataggtttaaaccacagccccccagccagacaggcaaccccattagaccaagacaaaaacccaatcccattcttattgcttccatcactctgggcatagacgactgttcagcggtgctcagtgaattaaaccattgccagaggctgagagacgacttcagtgaggcacctcgatcagccaggagagaggaggttccgctgcagtaacaaacagctgccaagtcgcagacactctttagagcaaagttttttttgctcatgctatgttcctatcatgggtccgtcttgctcctcatacaaggggccaggctgataaagcaacctctttctggaacattcctggtggtcacgacagagaggaaagagggatggatacactccatcctaacccatggcagacacgacttccagccccatatcaatgactttggtcattggccaaagaaaggcacagaggtacatgagagctccacagctgggcagagcagagacaccaaatatttgtgaccaaagtgagtctgtctcaatgacactaacccaggccaatgcagatcataaaacaccagtgcggccaggtgcggtagctcacgcctgtaatcccagcactttgggaggccgaggcaggcagatcacgaggtcaggagatcgagaccttcctggctaacatggtgaaaccccgtctctactaaaaatacaaaaaaattagccgggcatggtggcgggcgcctgtagtcccagctactcgggaggctgaggcaggagaatggcatgaacccaggagatggagcttgcagtgagccgagatcgtgccactgcactccagcctgggcgacagagcgagactccatctcaaaacaaaacaaaacaaacaaaaaaacaaacaaaccaaaaaaaaacaccagtgcacttaggttgtcacggaagcctccgggcttttgcagaaacaagaaggaagacttcccctcgggctcaagtggatctgaccactccttcaggggttgcccttagctgggccagattgcagtctggatgccctggacaccagagcatcaggcaggaaagaagatggaatgaagccagagggactgtcagagtcgttacgtcactcaccgctgccatttccatgcacacgtgaatcatggcaacagaaacacccccacacagagggccacggctgtgtagacgctccttggcctgccttgccccgaggctgaggatgctctgcccattatttgatatgcgggaggtttccacttggtttcctgttgcaggaagagaagagagctgtacttgtgcccacacagccaggggctggaggagggcaggtgccacctgctccggacctggcaggggagcacctcttgctgttccaaggagtttggaagctggacccagagggatttggcatggttttcatagacactgccatggagcatctgccatggagctagagccacttggccaccatagggaatcgtgttagcccagaggccaggttgcccctctgctaaagctcccctcacgcctgtgtgtgcctgtgtatgcaagcacgtgcctgcccatgtatgtgcctgtgcgtggctgtgtatgcaagcacgtgcctgcccgtgtatgtgcctgtgcgtgcctgtgcgtgcctgtgtatgcatgcatgtgcctgcccatgtatgtgcctgtgcgtgcctgtgtatgcaagcacgtgcctgcccgtgtatgtgcctgtgcgtgcctgtgtatgcatgcatgtgcctgcccgtgtatgtgcctgtgcgtgcctgtgtatgcaagcacgtgcctgcccgtgtatgtgcctgtgcgtgcctgtgtatgcatgcatgtgcctgcccatgtatgtgcctgtgtatgcatgcatgtgcctgtgtgtgcatctgtgtgcatgcatgtgcctatgcctgtgtgtgtgtgcctgtgcctgtccctacatgtatgtgtgtgtgtgcaagtgtctggccctggaaaagtgggcattcagcctcgcttccactctgtgtgtgctccttctccacctccccacagcctctctttgtccatccctgatgacttggggaaggggaagacaagatctttctcttctcaataaatctctgttcaagatgcaattccaaccgggtgcggtggctcacacctgtaatcccagcactttgggaggctgaggcaacaggattgcttgagcctacgcatttgagaccatcctggcaacaaagacctcatctctacaaaaaatacaaaattagctaggcatagtggcatatgcctgtagtcccagctatgtgggaggctactgaagcccgggatgttgaggctacagtgagccatgatcgcgccactgcactccagcctgggagacagagcaagaccccgtctcaaaaaaaaaaaaaaaaaaaaaaaaaaaggatgcaattcctggaaggacctgagtggctagcagcgccctgccctgtgtgattgcccatgggatgtgtttagatgctcgttcctgagggcctcgttcaggcctgtctcagcctcccagagccatggaccactgcgacccacaatgggcctctggtgcccacttccgccagggcttcccacagatgtgccacatcataggctgttgagggcactgcaggggacaggcaagcccgttcctaaggggccacatcaaggatgaaagatccaaacacatggaaaacaagcaatgaaagccgtaccaagtcagcactgggcgctgcaggggagggagtgctggggactgggcagtgtggaccagtggctcttcatcgacacatgaccctggcctccccaagcctcagcttcctcctggtaaagcagggccctctttcacagggatgctttgaggatgcagtaagctgatgtgtgtgaaaggccctgacactttcattcactggtctctgcaactgtttagtctttagagagtgagcgccacggcaggtcctgggaccccacggtgactcaggtcgaagggcccctgaccttacagaagacagacagatgtcacgcagtgccccacagtgactgcactcagctggggtccaaacttcagggggcatgtgggggtataagaacagctaactgggacccctaagtggggacagttaaggaagtctttccttaagggagtgacatttgagctgagctctgaagactgggtcgggatcaatgacaaggtcaaggggagagggagaggaggcactccaagcaggagctgcctgtgcaaaggccctgaggcccagaggagtgcaacctctagaggaatggaccggccaggaggtacggtggctctggtagcatttcatgaagcactatcatcatgtttgcatttttaaaagatgctctgcccatgctcccctccaatccacctcccactcagtagccaaagcctgtgaacccaggcaggaggccgcggccatggtccaggccagagaaggtggtggccatgggaaaggagggaagtgaacagaatgagggctttaggaggtgagaggggaaaggtgtgggggtgcctagaaagcggacatggcgggggatggagagcacagagggaggagcccagcctccgccttgtacaaaaagtgagttgggagtggtgctgtcctctaaaatggagaatgctgggagaggaggaggcaggggcacggatcacaaaaggcctggggctaaggacatgaacagacagttctcaaaagaagatataccaatggccaacaagcatatggaaaaatgctccacatcactaatgaccagggaaatgcaaatcaaaaccacaatgcaacaccaccttactccagcaagaatggccatacccaaccaatcaaaaaataatagatgttggcacagatgttagcagggaacacttttacactgctggtgggaatgtaaactagtacagccactatggaaaacagtgcggagattccttaaagaactataagtagaactaccatttgatccaacaatcccactaccaggtatctacccagaggaaaataagtcatgatacaaaaaaagatatttgctcatgcatgtttatagcagcacaatccgcaattacaaaaatatggaaccaggccaaatgcccatcaaatcaatgagtgaataaagaaaatgttatatatacatatgtgtgtgtatgtgtgtgtgtgtgtgtgtgtatgaatactactcagccataaaaaggaacaaaataatggcattcacagcgacgtggatggaactggagactattattctaagtgaagtaactcaggaatggaaaaccaaatatcgtatgttcacacccatctgtgggagctaagctatgaggacgcaaagattaagaatgatacactggatttttttatttttatttatttattttttttttgagactgagtctcactctgtcgcccaggctggagtgcagtggcacgatctcagctcactgcaagctccacctcccgggttcacgccattctcctgcctcagcctcccaagtagctgggactacaggcacccgccaccacacccagctacttttttgtatttttagtagagacgggatttcaccgtgttagccaggatgttctcgatctcctgacctcgtgatccgcccgcctcagcctcccaaagcgctgggattacaggcgtgagccacggcgcccagccgataaattggattttggggactctggggaaagtgtggggggtggtgaggggataaaagacgacacactgagtacagcgtccactgctgggaggatgggagcaccaaaatctgagaaatcaccactaaaaagcttgtttatgtaaccaaacaccacctgttccccagaaacccattggaataaaaaaattaaacaattaaaaatttttaaaaggccagatgatggctcacgcctgtaatcccagcaatctgggaggctgaggcgggtgcatcacctaaggtcagtagtccgagaccagcctggccaacatggtgaaaccccatctctactaaaaatacgaaaaatgagctgggtatggttgcaggagcctgtaatcccagctactcaggaggctgaggcaggagaatcgcttgaacccgggaggcagaagttgcagtgagccgagttcacagcatcgcactccagcctgggcgacaacagcgagactccttctcaaaaataaataaataaataataaaataaaataaaaatgtttaagacctgggggaggtctaggaatattcaggaggaggggcctgcatgagctggcacttgggtattggctgagccctggtccagcccagggagagtgaagaaagaggatgatgcctctaggaactcccagcagcaaagtgccagtagggaggatgagcccaggaagcaagagcatctgaactcagggtggacagatgagcctgatgggccgagagacaagagaaagtgaaaggttaggatgggctccgtggggccgggcagtgagctgagactggacaggagaggagctggacacaggccttctttgaccaagtcttcatttgtcttgctggcactgacccccagctgagctcctgcatccaccaaccagccttcccatctcccaggctggggccctcagactggggtgattcccagcatggaggcttgcccctggtgtggactgagtgcagagatgccccaactgttcacatgtccatggaaacattccctttgcaatgtgactttgtagctccttccaccaagaggcagggtctacttccttgccctttgaatcagggctggcctccagaccaaaagatgtcctagacacgagggtgcccccattccaggtggggcctcagcaggccttgctcacttccatttctgtcccgggacccaggcacggacgtgtgagcaagcctgagtgagcctgctggagaaggaagagccaggagaagcagggacctgtctcaagtccagcggcctccgccccacctgccagctgaccacagaggtcccagcaagcccagctgggaccagccaagcatggcccagttcagcagaagggcccagatgacccctggactcatgagcaagaacaacaactgctgtttcaagctacagcgttttggggcgtgtttgtgatgcggcagtcgctgactggtacccccttcccccaggcatgaggacgttcctcaacttcatcccgcttcccaggattagctagaaaccaacagagccatgtggctaaatccattctggtagggcttgtaattgagctacttggtgagatcttccgtttgattttctcttttcatatgttttcaatcagaaatatcagaagctgctttgaatgtccctgcagagttctcagaagcatcctctcccgggtttctctggagagcccaccttgtttgttggagagtgtattctcctgcagcttttcaaatgctacgttttcctctgatggcagccagggcatttgattgcatgagagatggtgatgtggttgcaactgctgtcgatattcctttatgactctgaatttgcatctgtgcaagtctggtaatacctgaattccaggcacaaataaatgaaacttatttaaaataactgggaaaaattccacactggaggtaaaataaaaaatagatttgctgctacagatgcagaaactggtccaagaaagaccactggaaattgactcaataactggccggtcccaagaagtctgtagccagagtaactggtgggcgcaaggcagaaaggtgaaccattaaggcctagaccacacaccctgtggtgcctccactctccaagaccccccgcaaccctgagaataggaaggtggtgtgaggagaagggagcatggctggtcacgagagcccttttccacactcggtcactatggtgctggcatccttcctgtgcaatgtaaggggcagcagtggtgcccacattgcacaggagaggctccatggagccaaggcagcatgaccttacatagcatgtccacggcagcctgatcccaagacctccaccttgcagtccagtgtcctttgcagtagacaccagcaaggctagggaccccagcccctgctgttttcatcctaacttggacttatctgttgtgatggccaggccaaccctgtttgggagaaggcggctggtgagaataaacagggaacaccggcatcgtctacaaacccagtggagccactcagccaggaccctcagccccaagctgcccaagtcactcagccaggcgaggtccccccacggagcagcaggctggccagaaagcttcagaccacaagcttcggaccaagcggcacctaggaagggagcaggtatgtaaccagggaatcacaggaccttgatcgaggtcccacttggaggcagggggaaaggctgtgggagaatagatgaaggagcccacggggaagcagacggagctacttcacgggaggacggaacatttgagttgggtcttttttctttttagagatgggctctcacccaggctggagtgcagtggcacaatcatacctcactgcaaccttgaactcctgggctcaagcaatgctcccacctcagcttcctgaatagctgggacacagaggcatgccaccatgcctggctctttttaaaaaatgtttttgtaaagaagggctctcactatattgctggacttgaactcttgagctcaatccatcctcccaccttggcctcccaaagtgctgggattgcagtcatgagccaccttacttggcctgagttgggtcttgaggcatgcataggagtttccaggtgggatgcagttgctggagctggaccatgcagatccagctctggagctcacagtaatgttcataaacaaatggttttgagccttacgtgagccaggcccaagactgggcattttctcatgtgttttctaatgcacttgataactgatcttattctcccccggggactctgggtgcaaggagacattctgggcttcatcccaccatgaagaccaaaaaacatcctgagggcaggcttggcatcaaatcctcctcctgccactccaggagccgagcgcagaccttgctgcagccaggaaaataaatagtagttgaccaaggtactgaccaccctcaccccaggttaggaagaacctgcaagccaatttctctttgatgtgttgagctatagcccaccccacacccccttcactgctgtttgcttccctaaaaatgaatagcactctgcaggtatccccacccttaagcacagccctcccccaagagacctgtcctgagcttggacctgggtgatataacgagacccatcctgagcttggacctcggcaatatagtgagaccccatcctgagcttggacctgggccatatagcgagatcccgtcctgagcttggacctgggccatatagtgagaccccatcctgaacttcgacctgggcaatatagcgagatcccatcctgagcttgggcctgggccctatagcgagaccccatcctgagcttggacctgggccatatagtgagaccccgtcctgcacttggacctgggccatatagtgagaccccatcctgagcttggacctgggccatatagtgagaccccatcctgagcttggacctgggccatatagtgagaccccgtcctgagcttggacctgggccatatagtgagaccccgtcctgagcttggacagttctttcagggcatagcagtgctcaagggtggggaacttaaggaactgcctgggagggggcattagagctggggctaccataacacaggactgcacactggcggccacaaacaacagcatgaatcctcttgcgctgcggcaggctgccgtctgagtctgggtgtggactccgcaggtgggcttcttctgggggctctgagcgaggatccgccccagggctctccttggctttaggtgctctcctgagtgtccgtggcctgtggctggctcaccccagccaagtgctgtcttctccctgtctctccacatcaccgtcccctgtttgtgcctctgtgtcctgatttacccttcagataaggacaccagtcctgttggattagggccccccatcccctctgagaagaccctgtctctaaggtcacattctgaggtcccggaggttaggacgtcaacatggctttttgggaggacatgattcagcccgaatgggtagcctcttccctcccaatctcctccctgctgcctgcccaggctcctggagcttccctgggacgccctgggggctgtaccagaaatgcacggggaggagctgggaccccctggaagggaccctggagaacggcagtgaagaggggtcacatgcaccccgacaccctccacacaacccaatacccccatgtgggtttggcctgcatcgtcccaccatggggggtctgtccttccaggtctcggcaaggcccaggcatgctggggagggctgtcagttcaatggtggacaccagcgtttgatgtggagatttggcagtgagaacggatgtgcctcagtgcgaggtttatataaaatgacagattctggaaaatgaagccctcagattaaaaaagaagaagaaaaggaaagaggaggaagaggcagcagggaaggtgccctccaccccccatgtattccctggagggcactgcaggggcggtgggggaccgggagacaaatgccccatttgggggtgcttcctgtgctgctcagtgtgccttggctttgccccaacaccgcctccccaccccccaggccacacacttctttaccatccccatccgtcctatacccaggataagaaccccaggggacaaggccctgataggggacagacacgcgccaagatagcacgcggtaagagacaagcaattatttggaaactttcacattactgtcgttttaaaagggagggggctagatggaggcaaagactccaagaatccttcctaggaagcccacaaaagcaaagatggattgcacataattgccctttgtttaaaaggcacatggatattcctgcagagctggaaactcattcttcacacaaaaaagcttccaaaaattgcaacctatttgttgccaagtttgggactgttatttccttcccagcccccttgggttgcttttttattttttaatgacctgaaatgtaaattgccttccctgtgggtctcctggggctgggatgaggtctagggaagtccgcctcccaggacatcccagctggggctcctccaggaaaggaggcggaaaatccaggataccaatgaagttcattctggccacctggcaccgaaagtggagcaagagaccagacctcttcccctgccttctccctggatgctgcgtgtccacctcctggcgttcagatggcccctttctcaccagaacgaaaaggagaaagcaaggacatcagctcagccctggggtaagagttctcatcaccacaaggcccaggaggacaatatcaaacacagccagcatggaccccaccccaaatctcaaagaaatcttcaatgaaccccaagaaggggcctcaagactgcagccaacttctcagaattccccaagcatccagcctctcaggagcacaaaagaagcctgtgagcagcttcccagccctcggagggacgagaagttcccgtgtctgccggggaccctgggagcagggagctgtcgccgccccttcctcccaagcctgctcactgttccagaaacaaggagtccaggagaagagccaggatgggggaataaaggtttccatgaggggagatcccagagaggccccctgaacctggcagtcacgtggtcccgggggtcggcacccattgccatgtgtcccccctggcacaggtgtcgctgggggccaaggcttcagaagttactgctggaatgagcccacctgcctcgggggcttccttcatctcaaaactcagagtgttgtcacagccacgctgccactctagatttcctggggacaggagacacaccatggccaggaccaatcctggcaccaaaaaggagaacccccagccaggctgcgcccatccgatggacaccagactccttggtacacatttattgggcacctactgtgttccaggcacagcctgaagtgataaaagccaggcacagcgccaaaggtcccagcagaaggtggcggccacccccaacccccagcccatccccgtctttccttcctcttgggcctcctgtcccctctggaattcagccccaaacagtatcgtgttttctgttgggtcaccgcctttgcttggagcccctgaaaacagagcctggggcaagggttggggcacagattgctggtttgagagcaagtccaggaagctggtgtgaggttatctgggagcctgatgaggatggaataaaagctatgtgtgcacgtatggagggtgtgaggaggggtgtgcacgtgtggagggtgtgtggaggggtgtgcacgtgtggagggtgtgtggaggcatgtgcacgtgtggagggtgtgtggaggggtgtgcatgtgtggagggtgtgtggaggggtgtgcatgtgttgtgtgtggcatgtgtaaacgtgtgcacgcatgtggtatgtgcagtgtgtgtgtgtggagtgtggagtattgtagtgtgtgcacacatgcatgtatgtgtatgtgtgtgggtgtgtgcaggggtggagtattttgtgtgcacatatgcatgcatgtgtgtgtgtgtagtgtgtgtggaatgtgaagtattgtcgtgtgtgcatgcatgcatgtgtgtgtgtctgcagggtgtggagtactgtcgtcgtatgtgcacacatgcatgcatgtgtgtgtggggtgtggagtattgtcgtctgtggatgcatatatgcatgtgtatgtgggtgggggggtgtggaatattgttgtgtgtgcacatatgcatgcctgtgtatgtgtgtggtgtgtgaacatgtgcatatgtaaatgagtgcatgtgtgtggtgtgtgcagtgtgtgatatgtgtggaatgtgtagtatgggcacacgtgtgcatgtgtggtgcgtgcatatgtgtgtggacaggtgtgcatgtgtgtagtgtgtgcatgtgtacgtgcgtttatgcagtgttattgaacaggtcaccctgtgggcaactggagctggatccatggggaccttccaggtcaccccgtggactgcctgtccctgggaaggctggggcagggagtggttccctccccacactcccacctgcgctgtgaacacactccctcctctcccactgagttgagcccaggactgcgggctcaggacaccaggactctcccagggacagccactcccaaggtggccccagcaggcccaagccaaggctgtcgtctgtttcagactgggcactgcggcatggggcccttgacagggaaatgtacagcagtcctggcgcatcccaaatgttctctatgatggcagcaccttagacttcatcccacagccatgtgctcccctgccccttctccctgcccagaaggaacctggcacacccactaccccacacccctgcttccatggccccctgcactcctgacctggcagaccccaaaccacagtctgcttagtggcagcaaccaccgggtgaaaagcctgagtgctcggaggtgggggtcagggaaggcagcccacactgggctcttgccactctcgggggacagaagtgggtggcagctgctccagggaggggtgcaggtgcagaagaaacccctaagagaggaacatgtgtgtccacagcccactcttggcaggcagacacccccaggagaccccacatcccaccaggacggacaccacctgcccttccctggcagctcccaatccttcctccttctcccagctctttttttgtaaactaagtctgtttctggagggcgcgtcatgtgtgcacgcctgtacatgcatgccgagtttttattccaatccttaaatgaggtctttgctgagaatttacaattcccctgtggcctcaatcttgcaaagattgcttttttaacgctgttaggccttaattctaataagcctcctccttattacagaaccaggtcacattgccttgacaccgccagaaaatctctcatggccacgggagggtgggcgtggagaaaggggctgccagagaatggggcagagatctgggaacaccgagggaggaatcctttcttaattcaatgcaattctaaaataatctaatttctgaggaccggagtggcctctgctcactttagataactttgtgatgtggttgtgtctcctgcaaatgttagttttcttttttgtgtcttgattttgaaaacgacaagaggagtcggggagcgacggaacccgatgggcacactgggcaccagttcaggccctggcctcaggcagtcggtcatctgcagcggcccaacgtctgttctccctgctcccaagggccaggagaggaaattgagagagtatggcaccagcaggctccaggacagaaaccaaaacccgctggcacttgttgggggtgggaggcacttggaccaaagggtttgggcacctggggaatccatcagtcaaactcgctctcctccctcttcctgagatagctgtttttaggttcaaggggatacagaggaagcacgcaattgaggaaaatgaacctgcctctgtctgactcatcaggacagcgcgacagtccctcctgcattctcacaacattgattaagcgcctactctgtgccagggagtggagaggtgggtcctcctgacccaccttctccactggaagtagaagaatctcagagctaagggctgagacggtgctagaatgttctttaaaacccttggaaactttcgagactgaggggtgagtccagaaacaaggtctttcttctagaagattctgcatatggagctgtggagacggcactctgcggggcagcagggacaaacaagaagtggaagacacagccctgaccctctggaggcacccaggccatagcaaggaaagagatggaaatggcttgctgtccccagatgctcctgttcacaccaccagccagccccctccaggctctgcctcccacatgctgacttcagaagctgtccactccagggccacccggggcctaaatccggctgtgcagcccggcccctgcgcagggaggactcgagccacacaaacccagcacctcgaggttcttgttcctgtccctgggactgcaggacccaacagcactcttcctcgagggcagtgtgagcagagccaattttttaaatacagaactgtacatcaatgtgacgtctaacataaggcaccttataaatcagaggccattttttaaaacttggatgtgaaaggttctggtgtccaggggctgggggtgtaggcagctgcgaggccttccaggggcacccctgaacatacaaggaagcacccactcagcgcttccccaccctcggcatgccccggaagccaccctcagaagcctccactgggaatttctgagttttcacgtgtggttcctcttatcctccatcccctgtgggtgccacacagagggccagaaggtttgcatttactgggtccccaaagaggagaccagactggaccatgtttggcacaagtgctgaccaagaacggagccctgaggacacgccctcagaagacgctgatcccctccctgggatgacgctccccatcccacccttagagtaacagcaggaatgacccccacccccgcctggagagccatcggtattgagagaaacgagccactttccaggtgtgccgaggctgaccataatggggccaccaaggtgcaaggtcaagcttgccagaaagaaaccggcacgcagacacgcagctccctggagagcagacttgggtccccagcccaggaactcgatcctcccactgaggcccaccgtgccccagcgaagaacatgctcagtcagcaaccgctcgctgggcacctgctttgtgccaggcactgggctaagcactgagaataccagatgaagacgagacagtgcaccaggtccacacgctttaggattaaatcacactgacggttctgccgtctttcttttccacgaaaatggactgtgggtctctttccacatccatggaaagcagctgcctaaaacccaccgtgtgtatgaataggccattctctcttgaacgcttttaaccaatcccctgctgcagggagtgtgttagcagcggggagacctgtgggaagtggcatgccagccgcgcagaggggaggacggacctggcatctccctctaagccagccgccaagtcacgaggggctcctatgcattccaaaaaccctcctagaggaagagcaaggtggcagcccttggcccatgggcagcagattcttggattctgcaaaacataattgtgaagcccaatctgccagcggagaaatatgcagcgcattcacaggctaaatataaataatattgattcatctgccatcttgaattatccattccacttctgttttccattagcatcaataatcacgagcgtactcccctgtggacggggtacattacgctccgaaggatgcagctggccccagggtcacacatctggaggagcctcaggatatcttccagaattatctggcatcttctagagcaatccagaaccttcctggtactttttcctccctcttatctactcctcattccaagcccaggaaagaggggtggctcaaagagacatctgagacccccctttcagaggcagtctgctctatttggcagctgactctggttctgggaaacaattgcacacgctccaaggttcacttccaaggaaggaggggaagaagctcctggggctgatgcagagcccaactgaaccctcagggcagaaccagggcccatttcctctctgggccagaaaccacagtggctttcctgcagatcagcggggtccttgttcctctgacagccctctgcccccaggccctggggctctctgatcagcaggcagagagtgtgcccagcaccagccaggggtgggccagggcctccggcacaccctcctaccccttctcagtggagcctctagagacagaaataaccaaggcacggaaacccaccagggccacccaccgtgggcccagccaggccacagagctaatgagccacaaaggcccctgccccccaaccagctctcagaattcaacaaatgttgattgagaatggactatgagcagacagccatgctaggtgctctgggaagacatggatcagctgcagcccctgcccgcgaagcacttgcagcccaatacgggagatggagctgcagacgcccatcaggatctgtgattttttgcttttccttctcagtgctgattacagctcccagaaagtgctatgggaagcaggtgctgacatcaggcccagagggaggctttgtggatgcttctcatgtcctctgcgtgcctgtctacgtcagtacgtcccacttgctcaccgccttagatacacccagtgataacctatggcttcgctatgttccgtgttgatagaaggatccaaaaccttcccgttggccttcaccgtctacttaacgagccacgcccctcctaggacactgcaagagaaatgctggggtcacccctggccgaggcctccctcctgctggccacacgtaagaaaggacttcacaagggagacctccgtggctgccacacacattcaccccaaatgcttcctggagaaagcacctgccctcacactgtgagctcgtgagtttgccaaaaaggagatgcaggagcctgagatcacctcctgtcttgctgctaaaatatcccagccgtggaaaagcaaggctggcctcaaattggggaatctggtcttgccagcccagctgtgctccagggactccggtttgcattgggaatgagagagtgttggccgggtaagatggcaagacagacacagtcctcctacagacttgtagaagggctttctgcccgcccccacccagggcagaaagaggaggcacaggggaaaacaacaagagccctggccaagaatgagccctctgccgtcgtcctgtgtgtggccttgtggcccagcaccagcgctggggggcactttgccctgcctgacaggaggaagggatgccctagtgaggtgggaaacagagggagaggttgagaccaccttggacaagaagggccagggaaggccctcctcacctgtcactacagcccgacacttagaaggtaccgcctgatttcagcctctgcatccacggtcacctactaagtaccccccataggtaggggttggctcctgcctttcccaggagggaggacagactcaccctgtggccagcagggagcagacacccccaaaagccactggggctgcagggcccccaaagtggaaatgacctgccactctgtccatcccatgggggagaaacaatcagaccctaggcagggggcatttagggcaaacagctggcccacagcacggactctcctctttgcagctaatttttggactgcatgggccacatctgggccctgggacttcccatggagccgcggcaggtagaaggatggaaccccacaatctgaagagcagagaggagcctgatcagaaggagtcttggcttctttattattcctccttgacccaccctctttccaccatccctcactagcaattctccccaaaatcctgctgcagaaatctgccttccaataacattgcctgggcagaagccacaggagcaggagcgctgcctgctggagggtgaccaacaggtgcaggggcctcaggtgccactgcctttacacacgtggccagtacaaaagagcactccaggaggaaggtggtggcaatgcagagatgaccgtgcacatgcacacatgcacacgtgcacacatgcacacacacgctcatgcacatgcacacacatacatgcacacatgtgcacacatacatgcacatgtgcgcgcacacacacacacatgcacacgcgcacacaccctcctcgttgttaaggaccttaacttagaatgatgtattctctgttctcctggctataattattttagcgtgggagacaaattctgtctccagcatctccgaagtgcaatgttggaaaatcacatcccatggtcctggaagatccctaccttctccagctcttttcctccacagaggagcataaacagacccttccaaggggtgaaccttggaggctttaattcctcctccaagcagctccacgtagagcaacagagacgcagggaccgtgcaagtaaccatggcaactccaggaagtttaaaaaaataagtttttgagttgttgagttgttatttggtgcttagtgggttggactcttgccttcctttttgagataacgaggcctctgaatggtgcttttaatgagctttgtgggtaccgtatggaaggcagcccgtgtccccagaatctcatgacctttgaagggggaagcaagtgtctcatctcagttccacagagtcccaggcaggtctgtcctcagattaggttgctccctgtggggtgatcttgagccagtgtggcccctccccaaccttccacccacccacagaagtgagaagtgctccatgcctccccctccccaggagacccaacatttacaggaactcttacagtgcccagctactctgcaatccagatccaccaggatcccaaatattcatcccaagacacccacgggggcaagtttccacgcacgcatctcctaagtgggggaagagggtcaggctacccctgcgaacatactaatatgctggccagcacgcatgtgtaggtgcacaggagacccgtgcaactccacccccgcacgacacgaccccactgcccacactcggagattctcagggtcccttgaagggtccagctggccttggtggaggcgaatgggagccgctgtcctggggtcagcccttctctgtgcaggccacagcagcaggtgttctgtgccaaaggtcatcctcgcgtgtgccgatggggtgtacatgtgctcacacaggcacaaaagcacgcacgctgctattcgtgccgtgaccgtgaagccaccgcagcaggccacgtcttgcggctcccaagggcaggctgccttgaccacccactgagcacctccgacagaaccatggcggagccgcagccccccaacaagagtttgttgcaggttggtgccgggagagctgaggagtgcttgggccacagctgcagaggcaaagggctgggctacctggctggggaaaaaggaatattttcttaaagggagaaaaatcctaaatggccctcgcagtctcttggcacacataattgtagtatccaagttaatgaaaggcctggcacatgggctgagtcacagcaaatgcctggccctgcacctcacatgcagcagctcgtagaaatcagacgatggcgggcagggggcagggggggcccaggaaataaagagcatttccaggaatggcaagtctcccacgcgggatcatatcatcaattagccagtgggagggccgaggagtgctggcatctcatttccacaaagacaaagtttccttgaggaaattgccagagtcttcaaggtactgaaataacacacagaacaaatgaagaaggacggccgcagggcttggtggatgctcagaagcccagctcccggcagccttgcagaggggcgtgtgtgtttaaagacacaagtggagcctgcgatgtccaagaggcaagcaccagtaccaatacatgacacacacatgtgctcacacatgtacgacacacatatgctcatgcacgcacacaggtacatgtgggtacacaaatgcagaaacacacttgtgcatgtgcacatacatgcacacacatgcacacatacaggatgcacatgcatgcctgtgtgcacactctacacacaggcacatgcatgtacaatctacacgtgtgcatgtgtgcactgatatgcacgcacctgtgcacacatacatgtgcacaagctctgcttgcaggtgggggtccactatcctgacttccaaacattcaggtttgaggctcttgcaaatgccagataccatggagacaaaacgccctctaaacacattatccagaattttcccttaattccctacagcacatgccccatttgtgaggagacccccggggtcttcaggctctgactctgatggagctcagagtatgtcaaacccttgaacagtccattcaggaaccttcaaagccacaccccagggggctcccacctcgaaggcccggggaagcagtctagctcagccgtctaagtggaggtgactgatttattctgaccatcctgactcttcacgacactgctctcctccaaccatgcacggctttaattgtccatcaagcagggcagggaggaaccgtaaatctttcctcccgctgctccgagctgagcctgcttgacctgcaattgccagcccctcgcctgcgtgcagcctggagaagtccgctggctctgaaggtgaaggaggggagtgaggaaggggaacgcaggagaggcagaagggggtcaggaggggaacagagagagccaggcagcaggagaaagcaagcagccgacatggccatgctcccgctgctcccgccccggggcccctgcggaggaatgaatgcctcagcccgactgcagcctcgaggggccccggctggggcgtctacacacctcgcctcccaggctcctgctctcaagcagcgggaccctgataaagtgagccagaccctcagggagtcttggcattcccttgccaggctataaaacatcacagccccaaaaggagcccgctgcgggggatactgattctccatcccacattcacggtgtctgcaactggaccccagctaggggcacaggatcctctcttagggtgggtgtctctgtgagggcagggacaggccaggggccacatagccccagctgtggccgggagaacagagctggtccaggaggtttagccacaagctccaaagcacgcccccttcccctgcagcagacttaatattttctgtaattttagtatatattaatgcacttcaaagtggtgaacattatagttatgattattacctaaagacttcctttatagccctcattttccagtgctcattactttctgaaaaattatccttgggggctgaaattttcctagtctggtcttgtgagttttcttcttaggttttaagcaaaacatatccggaagggggagaaattacttctcccaaagtcagtctccttggtgacttctgccaaggaaagaaccccatgggaagggggcgggctgtgtctttagcatgtagatactgatactgttatcagtgatctggccttagttgtgcccgtctgttctggagagacggctctattttaaaagtccaagaggcggggaggtacccatgcgacactcatcttgcatgctgcagcctgggcaagtcaggaaagtgaatgctggttatggcaatgctgccgacgcacacacacaagcagacgtattttccaacacaaagtgcagatctgcagaaagtctcctgtctgtggcctggggatgccgatagagttaaaagcatgcagattctaggtgtatccttctcagctgtcctagatgagatctgccggtgagaaagaaaaatgtacccgctggaagacggcctttaatcatcctataaagttgtcccagacaacgtcacaaggctttaatggtaaggaaaagggtaacaggctcccccatcaaacacaggccatcgtccacctgctctccctcccgccctttggccatcagctgaaggttcccagctgtcaagatatcaaacagacttctggacgataaagctcgacacagcgttggctgtctgggagtgttgattataatgttacgccactgacaacagtaattctcaccttaaatttcttctcttttctgctaagattccaaaatacttgaataatgtacccttggatagcacccctgcgaggaacacaaccaaccactgtcggtcttctccccagcagctgggggcacgcagccaggatggccggtgaaccacacgccccgtcccaggtctataaggagcctgtggaagcaacccctcgggtctctagttccacttcacctgtccctgccgtgaggcccccagctgtgcctaatggcatgacatcaatgatagtcaatactccagaaagaataaaagcacacactttgttttttttttctaatgggctttgcaaagctgtgcttcggtttttcatgggttgagaactgagatccaaaaacatatatccacacggaaggcaggggtgagctggaatccctcagcctgcgcggtaagcgatgtggcagcaaactataggctcagaggagcccgggaagggctgggggagggaggccatgatcctgcttcctttcctctccctcatgggaaatccaactggcatggtctggagcctcatctctgatgatccaatgccactccctttgcaaaagcaagaggacctgctgcagtgcccctctctccttgagctaccctttttttttttttttttttttagggggagtcttgctctgttgcccagactggagtgcagcggtatgatcttggctcactgcaacctccacctcccaggttcaagtgattctcctgcctcagcctcctgagtagctgggattataggcgtgcaccatcatacccagcgaattttttgtacttttagtatagatggggtttcaccatgttgaccaggctggtgttgagctcctgacctcaggtgattccctgcctcggcctcccaaagtgctgggattacaggcgtgagacaccctgccctggcctccttgtggtactcttgacaccccgctggcagtggaggcatggggagagcacaccgggcccattgaggggacacagcacaggcaggagccctgttatcccctggatggcctgacccgggtaacaactgagtccacggccccacagacaggaccttacttctttctgcctggcttcggggtgttcctaaggacatgagctgctgggggctgctccagggagcccttccaggccacccaagggagtgagggtcccctcagaccccaacctctctatagagacatgctaagggttgtttccatccttacatctgcaagtttatcttttaaagcgagctctattaaagcagcctcataattatacccacagggaacagtttggaatccattccttaaccctgacccttccgaaccctagcaacatgctcgttcctctactaggtggatagccccagggaagggtcccactcaccacatcagcggctttacatagatcgcctgatccacgcagcagtccctgcttctcagcagggtaaactgaggttccagagcctgccctgggtggcaaggctgggaagggtgcacgccctccccagcggtatgctgcaggcaaccctgccaccatcagaggtcagctccggcctcaggctgtccctgcacagagcccgcccaccagccagcaggtgcaggccgaatccactcaccacacccacaggttgtgcggccggccctgatgggctttaagagctcatgaaaggtaactgacataccgccttgctcagaagtcacttccatttcaatgtgcatgtaactgtgtgtgcccacgggcaaagggtgattcttgtaagaatcagctgatgggagtggggagctgccaagatgtacaacctcagaacctcccatgaataaggaaactaactgagtgaagactcagccacacctccagggtgaagggcaggtgtcaacaccaagtcattaggctttgcagagcccatcaggagcctgtgcatggacccagtttaaagcatattctgggtttcctttttttgctcggatctcaaggtgacgggtaatgtcgggacataccggtgtgtgcggctctcccaggtgatacattaaaaagtcatcctcacacctcgctgctgaaaacaaaaagctacaaagcccttcttgccattgctttttaaaaagtggggtgggctggggtggggtggggaagaagaggtcaccagcaggtgcttgattccaaggtgcccagaagctcttaggaacagaccctggagcttcagccagcccccagccctcaaaagttccagaaaaataggagttgtttttgatgtaatccaggagagaaacctctaatttgcattaagagtttggagctatgaaagtttagtgagaaatgatttctaaaggtaccagggtgtttgtacttgctttaaatctttctccaaattgtggaccttcctaatacaaggaaaccctatgtcctttggctccaaaagaggttcccatttttccatcaaaaatctcattgctgaggatagcctgctcctccatgttctcatgaccgttgcctaaaagcaaacgatccggagacatgagcctggcccaggaatcggcatttgcttggtgtccaaggatgtgaactgcaggatgagagcaagggcaggagaagcacctggactccagggacaccattcctgccatcttcatccctgggtctcacctggtgtcatagacaaggagacgtggatgagaaggactgcagtccatggtgttcgggctgctcaagggcagaactctgaatgcgcccttggtttgcgtggcacactgcctccactactgtattggtggccctgcagaagagaatctgatctggaggtccgggttacctttgtttgtttgttttgatggagggagaattttggagcaagacaagatgccttggcacacaggattctccgctctggcacaaaagatacatgttatgatctcaactgggcccccaaacaaggacttgaaactgttcaggggctggctggtggcagctttctatgctcaggcagtttccttgcctgcaaatgggattattttctaaaagggctaaaatagacatacccggccaccttcctcgccagctggcttccactcacagcccagcgttcaaggcagggtgggctcacctccccaaatatggagcagccagccacgcagagacctgcgcatacagagctgatgaccagcggtgggtccagtagggagacggccaggtacagagcggttgctccgcctaggcctctgttcttctggagtcttgggagaaagctctcagcacagccgctaaccaaagcaataagcaagtaaattcctgctaaaaatacatatattcttcctctttcttttttctgctgggaatatgttctgagcacaaataattaaaccttaaaagaaaacttgcagtagcaagtgcttggctcttggtcctaagaggaaaccacggaggctgaggacccccaactcaagttgacgccagcaagttacaacccacctctcaggtggaacccacgagccctggccccaacctacacggaaggagtggagacggatccaagggaagactgattttcacttctaaaaagcttccccaagccgcagctttctctacccacaaggggaacactccccacagaggagagcaccccatcccttgttcttctgccccctatcccctgactgcagagccttcgataccacagtcttgtcaatgtttcgagtgcagtgagttggcaggggcagcagcagtgagaagggagaggaggggcaaggagaccacctcaagctgctggtctgtctagagaccaggaagaaaccagaaggacgcctgggcctgaccagaacagtcaaggcccccacgtgtcttacaggtaagggccaggatcagaggcctgatgacaccaagctccctgcacccaagaggtggcctttgctttgggagaaaacatacttgtccacttagcacttgtaatttctataggagtcctatcacacagtggagcacatccctaggcccctaaattaaagatggtggatggtcctttcccaggccaagagggggactcccgtggtacccgggcaagacgcatccagaatgactccttccacctagaccctggccacacttttcaaaatgcaactgatagactgagctcgccccgagctacaaataaactaacagactttatactctttattattccagcctccctctaaggcgtgttttggtgtcagtctatgtgttggagaaactgtgatagcaaactaatttactaagtgcattgcacttaaaaatgtctattttatacaccaaatcagtctgtgtcacgtggtatttcttgaagggaggtgactcgtctgtctgtgggtccccaacccagaacaggccccgccgggtatgcacagcatatgtatgtgtgcaatgctccttgcatgcccgccatgcaactgttaaccaagagccgtcctcaaccctcacaggtcacacaaggaggcaatcacacactaagcatccgcgccactcagaaagcacaggaggaaaaaagagttggggagaggaagagatagacggacagggagacagggagatagacccaggacgttatagaggacagggatggctcagggagcaaccttcttcagagaggcagcagaaagtaagatgttgaggctgcctgaatgtttcatgagcctgtgaaaataccgcgctgctttatgaaagagcgtggagagatgctgcagcttatcaaagggtggaggtacaaacgggatgtgtttataaagccggtgccttgtgccaggagcaggggcctgtggcaggcagggatttagggaatggtaggttccctaccaaccaacaaacgggtctctgttgaagggggagaaagtttcaagatggcttcttccccttcacttgtttaaaaataaaaaattcctcaccaaatgtcagctgcgtgtcaggttccatttgtctttataacagagtatcaagcaggagcgtggaaataaataaacacagggagacaaccgaccaaaacttgcaggctctgggctgggctgggctagaggagggaagccccaccctgcaagggctgaaaaataatattgcagtttcgcgttcagcactgtggctctggcccactgacatgttttcctctctttactgccccccaccccctaccaccaccactctggcgcttctgggagggataggagcgtgacttatgcattccttccttccgaattgcacaggcatcatgggtcagaacaccatctgcgtatatgggggagggggcagataaaccaagcagggcccctgccctcagcagcaaggcacctccaactgccacacatcggtatgaaggcgccttaggccagggctgaatgtggctgggagagaggtgtcaaagaaggctgcaggggagaggcaacagggctgaaccagccagggaagatggcattttctctggccactacagtgtctagttcatccctagacaccaaagagcccgataatctctccatttcaccgatgcgccatcagccacgctccaagttgagtaagtgacaggcgcaggacagaaggcccactctggaatggtacccaggaggcctccttgctgtaattacctcttcgcaggccctgggcttttctggctcttgaatgagcctcgggagccctccccatgtcctcagcagcctgagggcggccgcccgcagcgcctccagcggccctgggaccgtgtcagaggagggagggcgaggagggcaggctgtggaggccccggccctgtccttggtgctggcgcccgctgagtgcctgctgagccactcagaggcaggggccgcccatgccgccaccttccctcgacatccgcctctggtccctgcggaagggcagtgaatactcccagccccgctgtggctcccaaccgaggtcactgggtgcggagcatttgccgcaaaggcccatccgagtaaggggcggagcctagggacttccctggactcctggctcctcctggcacccagaggcgacccgaggtccccggggtgggcacgggtctctctaggccccaggcccctgaggaaggtggatcaaagcaatcacccaggttcccttttttctttggggggaggagggtggatagctgctagaaatggacaactcaccccagaaaaccccggccgtgcaagcgcaaacagcccagcaccagtggcaacccctgccgcacgcacgcagccacctcgccaggcccaggctgtctcggcttgggtgcgtcccttcaaccgtgcttcttgctccttaaccccttcagtggtccccacgtcacccgctctgtctccctcctggggacagccttgccctcccagaagctgtcagccaggaaatgaagggttaagcgttgcttccaggagtgtgcggtgagcggtgagcgaggcgcccacgcaggaaggcctccagtcctgggggaggggcgggggggccagcctcggtcctcggccaaagggagctcctcgcccgcaggaggcggagaaggaaggcgcgccgggatggttctaagaaggctcccctcctccgcccccgccatgccgcccccacgcccccaccccgccggcgctcagtgacctggggcgcccctgcaagaggcccatacccggctttcatcaggcagcgccttctcgacaacttttctccctctctcccctcacaatttttgctcacctggagggtcggtttttaattagtgtaatatccccgtgaacaacgcagcctaattaagacatccgtcccgaatccgcgatgcacacttaatgagcaggttctgccgcaatgtttatactttttttttccattatgttttgcagaccagtaaaaccgaagccggcttccggctgaaagacctcattacgggcgaccccactccattagcctcctacctgctccacgctaagtgcccggggcgcccgggtgcatgcccaaggcgtccccgagtccaacctgcgtttggagcaggaaattagcaacctgcgcgcccgagaagcgacttcaccaccagctggggcaggaagggggacttaaacccagggatggatcccttgggtctctgtccttagcctccaccgtggggtgtctcgcgcgtcgggactagcggctccgcgggactcctttttaaaagtgatcattaaataaatcaggtacctcgccaaagctggaacggaaaggggagggggaggcagctctgttgtccaggagtttctccccacctcgctgggcccccgcccccaccagtggactccgggaacatcccacccccaccctacgtgataccagggatcccagggccgcttggggacccgacaggttcccaatgcccctccacgcggggcgccgcgtctcggtccccgcaccgacactgcagggctgcgcgccaggggaggctccgcgtcccggggagggaggctgcgacccccagcaccaaaatgaccactggcctcgcgccaccccgagacgccacagaagaccaccttcccgagcgtgcgagcccaacacgccccgggcgagccccaccaccgcccggggccaccagggcagaaagtttgggccaggggcgtgcccggctttcccagcccggccgcgctgctcgaggccctgggggtggccgaggcttcagagaggcagcctctgctcccgttccagccttcctatcgtgcttggggactcggcccggagcgcccccagcccgccccctgtagggccctgcgcgccgctcgcccctcgctgctcggcccccgcgcacaccgcggtgctgcgggccccgctcctatttggggagctgtggcagccccttcctccccacaactcctttgggtcatcaacctctcagcgaccctcctttcagaggaccccggcagggctctctccgggcctgggtgccgcgacagacgcacgttgcaccaccgccgggtcgccagcctctctcccacccgcgcgggctccggctgcctgctcggacgcgccccgcggggccgggatctccgcgcgcctctgcctccccccgccggggagttccccgcgccgggcattgtgccgccgccgccgccgccacagccaccaccaccgccaccgccaccgccactgccaccgccacgcagcgcgcgggactccctggcgtctccatggagcccgacccccgggccttcccattcacaaaatcgcccctctggcccacggccggacagagcgtccagaccccagccccggagggacccagggaccccgaccccgcgcagggacccctgaccccgagggcgccaccccaccccacgcgccctcgggtcagccccggccgcgctcagcagcccgcctcccactgcggggtcccatgcgcccctccgcggccatgtccccctcccccagctcagcccgatgggaatgaccgccgcagagcgaggcgggcgacgaggccaggctactcacgggctcagcgctccccgcggcaggtgactgggggccggcggccatgccccggctgcatcccggccgccgagcgggcagcggcgtcctggggccgcacaggcaccggcgagccagcggcaaggggcgcgcgaggccgggctcgggcggcagctgtggcagctgcttctcctccgaccacgcgagctgctggggcccggctggggccgctgtccgaggaggttctgctggcttcggagcagccccgcgctcgctcttccctcgcctcctctctctctctctctcctccctcctctctccgccctccttctctctctctctctctctctctctctctctctctctctctctccgccctccttctctctctctctctctctctctctctctcgttcctctggctcgttcggctggagcgaggcggcagcaggagcacgcggcggcggcgcgggcggcggtggcagctcgagcggagcgcgcagcgcgcggcatgggagggggctctggctgtcgcgcggccggggagggcggcggagcggggagagccatgaccgggtgggcttcggcggtcagcaccctgcagccttcagcgccaactcctcggggcaggggcacagaagaggtggggtacacacggaagatcccagaacccagtgctgccctggtcccttcaagggcagccccaagcccgctgcccctccccacctccaagctatcttgggggcggatcaacccaggtgacccttaacaggacccctgcccttgtgcctcgctgtccctgggggccatttttctttgccaggcccagggatccccagcaatgggacgtggtcaccaagcatcagggacgaatgccaccccaccccgcatgccatgccatgcctttgagttgcccacataccccaaaccccctcactaggcccaggtgccctgacttcctggaggaccactggaaaggaagggatcgggcccactccgtgctgttagtccagattggccaacccaacccatttaaacatttccacctgtgcctggctggagaggaaggactgtgggaggtcagcttaggatttccctaaaatcaaaagatcaggtagctcctgtccccagtcccagcctcccccagcatctagagtaaggggcctggtgtgagttctgggagggtctctatccttggtgcagagggagcaggagagcagaggctgaggacacagtggagtggggaccctctggaaaggcaggagagatctattgctggggtcagcccaccactggcacacaacaccagaagtgggcaagaaggtctggacggtcccaaacaggtttaggcaggaggctgagtaatcatttccaaaacaaaagacattctggtgcagcaaccaggctggagaaacgagcctgcaccatcgaaggacatttccaaattacacacaaacagatccaaacccgtccccatgtcacttttgctcctgaaggctgctcctggaacaattagcctcctcctcgcacctgactgtcctgcttttctgtgtgaggtgaaaagcacatcatggaatctggggtttggtaggggcctggaagacccagaggccaggaagaggggagtatggatttggagcttctcggtagtaggggctctgggctgctggctgccccccctgcagggcagcagagacggtggccaagacagtggccgctgcccacttatgagcgtcatgcttttaatttctggccctccagcccgtctgggtcattgatctgtcttggccggtgggaatcgtgttatacaattccaagcatacagctaaacagccccacagctaaccaccagataaatgccgtgtctacgagcaaggcagccgcctggttgactgaactttcccctgccaccggatttgaaatggcgcattccagctctaaagccctaattgggcctcttggttctctgctgtcagatggtccaggctttcgtggcctccaactcccggctgggcccagccactgcctggcaggcacctgtctccctgcaggcagggctcttgcctcgctgtgccggcagtgccccctgtcggtcccgcttgtcccttgcccacatttcttctccctggggagccttttcctctctggtccagaccctactgccctttggagcctcctcgcagaaacctctcgaagagtgggattcgagcccatctccgtctcccttcagctccccatgcgagttctgcatgtgcctgtgaagtggggacacattgacctggcagagctgtgtgcccgagtggaagaggggtccctgcaaagcatagggcccggtaaatcattccttggggacgttctggaagagctctctgaagacagcaccaaatcttgttccaagttccaccagtcccagcccaggactcaggacacggtgggcctgctcagacgcccgggtggtaaactgaaattggcctctgtggttgggactggccacagggcctgcgcgtgaggacaccccttgggaacaggccccagccaggccggcctcattaccagccccagagagtttgcccttcgtgctcagctgtcgtagacagggatctggccggaagagagtaagtgtcagggccagcaggacataccagcactaaccgggagattttccatttggggacgtcatctaagagaatttttaaaacctctgatttggaaactttaatttttaaaaagtgagcacatggggaggactggggagtccttggtaataatcattaggagagaaacacagggagactgggcttggggccaacaggacgactgaaggcacagagctaatttcgtgccctctgaaaaatcccactaaaactacaaagagaaaattttaaaaaggggctgggcatggtggctcaagcctgtaatcccagcactttgggaggctgaggtgggtggatcacctgaggtcaggagttcgagaccagcctggccaacatggtgaaacgccgtctctactaaaaatagcaaaactagccaggtgtggttgtgggtgcctgtaatcccaattacttgggaggctgaggcaggagaatcacttgaatccgggaggtggaggttgcagagagccgagatcgcgccactgtactactccagcctggacaacaagagtgagacttccatctcaaataagaataactttaaaaaggcataaaccccaacgacctggagaataggagaaaagagaacagtagccggctgtgggcagcggggaggcacaggagaagtggcggcccgccctcacggagctgagtctcggcccagaggcagggaaggctgacaatggaatcccccgaaggctcagaaggcgtggggcccaagacccggggaagcctggagatcctcggatagcccctctggaggtttattccctgaggacactgaagcagcctctgtggcctgggggccgccagacactgcggacagaggggcgtcctgcacggagagccccccttttccctcacggcacctgtcagcatcctgacctccaccctcctggcaggaggccggaagaatctcctctggggaatctcaccagcacccagaggggaaacctgaagatagagctttgctgcttccaagcacaggccccactccctgctcggagctgccaaccagctttgcagcccccctaaggtgagtaaaaagccaaggatgaccagacacctgcggaaagccttcatgagaaggagccgccaaaacacgcaacagagcggggccgacttcgaggaaacagatattaggcagggaggagaaaacatcagaaatagcagtatttaatatcctcccagagatcagaggagataccgcatccatgaaccaagagcagggtgctattttaaggagaacatttagagaacaaaaaagctgggaagttaaaagcatgagagcagaaacaaaacatctcaacagacaggctggaagagaaaagtaagggaatgccccagaaggcaaagcaaaaaggcaaagaggagaaaaagaagaaagaggggatgaaaaaaaactagatgatcaattcacgaggctcaacacaaaaggaattctaaccccgacccccatagggcccccagagagaaggaggaggaggagaagaaaggaaatcatcaattacttaagaatttttttccagaaataagtttccaaattgtccacaaaatcgatggaaatgattcatatcaaggcacattatcttgaaaagtaaatcactgaagaaaaaaaaaaaatgtttccccaagtttccaggtgccataaaaaagagcaggaacgagaatagctccagaattctcaacacaaagagggcagctaaccaatcacaaagcgtgccttcaaaagctgatggcaagtgatttctggcctggaatcccttacttcacaaaattaacaatcaaacgtgagattaaaacaaagacatttgcacatgcgagatctcgacaaaattatttcccacacaccatctctcagctaccagaggacgtgctctaacaaaacaagggtgtaaagcatgaaagagggcaatgagggatggaagaaacagaggatctagtaagcgggcagggatccacatagtgggagaggagggagggcaggagggcagctgtgtaccgggcaagaggttgccagtccagatgagagcagggtggtggcatgtccagctgcctagggctcagacatgtagagggctgtcactaccaagatgcctcctgccattgtaccaccctttcagtgccaggtgagcctggcccctgctcccctctgtgcccggccggctcgggccgtgttgcagtggagtgcctgttttcctttccacgcactgccacctgtgtaagctgaagaccctcatttcgccccatggaagcatttactttgatctactcttagcatcaggaggtggccacagggaacaaagaaacagaaaacacacatcagcccaccaacctgcaagaagccccagccaaggaggcccttggttccccaggacccctcatgccttgcccaagaactccctaaaagaggctcttgtaaagcgtggggcagctgcggttccagagtttcacattgtcttctcccaggctcctccgtctaagggtagcagacccaaatcatcacagacagaaaggacatcatggccccactttcatattcagcactggacacatccacagatagaaaggaggtgaagatgcaactgtagaaggatcgaggaaagcaagagatcaggggcctgctttttccttgctggtctttgacgttcttgtgaggtccacagatggccagcaccgacggcccgttggagagctgatgtcaccgccattggctgccttgcttgctttctcagtccaacagagtaaattataaggttactctatgtagtcgtaacctccttgttaagaatggatctctcggccgggcacggtggctcacacctgtattcctagcactttgggaggccgaggcaggtggaccacctgaggtcaggagctcaagaccagcctggccaacatggcgaaaccccctctctactaaaaatacaaaaattagccgggcgaagtggagggcacctataatcccagctactcaggaggctgaggcaggagagtcacttgaacccgggaggtggagattgcagtgagccaagatcacaccactgcactccggcttgggcgacagagcaagactccatctcaagaaaaaaaaaaaaaagaatggatctctctgtctctctctatacaaacacacacacacacacacacacacacgtgttactacttccccactactgccaggcctgctaccgctgttgtatgtgtcggatctccccttcaggccaccatccaagcacgctgtgggaccctgtgcagtcctgcatcaataaataccacttagggagagccccacacgacctgagggaatgtatgatcaaaacgccccactactgtttcacgaaacacgcggggcagatgtgcaaacatttatactgtgtgggctctcaggggttgtgcacctgtccgggctccatggaatgtaggtcacaaggagaccttggaggtcagagacgccaaccagctaacttaaatgaagacgtcacagggccgggctgtgctctgtcccatagctggaagagaggtgttcggccctcacacacccagcctcagcctcagctgtgtccgccggctggctctccgctcttcacttcagtcccaaggtttatcatccctctttctcctgacccttttttcctggcagatggtggcacagtttcaccttgaagctagagccttcagtgggagcagctttctccctgcacgcctccttctagtttcatcttgtcttcctgctccctttcaaattcttcttccgttttctccctccatccagccctctcttgctctatcctcttctgtctttcctgctctggggatgggggggtcttagcctaccagcctaaaaaccttatctggtcttccccatccttccagaagcacccctagatgctcttctctcccctcgttccccttccatcctcgccttccctcgatcacaagcatccctacctccacgtccacacccacggacaccccagggaaatggctctctcgggtcaccagggaaggctgaatcacaaacagccaggcctgcactccctccttggtttacttgatcctttactgcaggtggccccgtggccaagtccctttctagaaacctcgacttcatcctccaccacagcaccgtctcccactcttctctcccgaggttgcacgtcagcatctccacctgtctttctctgcttctccctaaacaccagcgtcccattttcccaggtgatcctatttttctccccaatgagctcatccctccagtggtctcactgtcgtggaagtcatccccgcattttgagctgaaagcaacttcagaggtcatgttgcacagtccgcccatatcacagatgagaacactgaggcccagaatgtcccgtggctcgccagcagctctgggtcctggcctgggatgctgcctactgcgccagccccactgccccgccgcctcttgtgtcacatgcagggagcagcaagcgcatctgcgatgtcacatgtgcacctccaggcttgatattttatttaagagtgtgcgactccatatcagtgcccagtggctttcagttctgacatttatcttctccagaggaggatgaaccacttgcacgccgtccgtctctcctcccacgtggatgggaaatgtcagagggaagtccaggtagttcagggtcccacgtccacaccacaaggatttactgtttttgtgctgcttgatgacacagctgtgtttggggagcggcgatagcctaaaaaacacacaagtggaaatagcaaaggttttctgaggcaccgtcaatttctgcagccggggcagtggccagtgtctccgggaacaggcgccgcagtccactcaggggcccacaggttcttccccgtcttccatctccttgtcttgagtgggacgtgagccgtatctctgagctcagcctgtgattgcacaataataccacccagaaaacaaattaaaaataggaaaaatccatccaagccgtgtgtctgctcaggcagaatagtgtcagattgctaggcaactccaggcagtcctgggggaaggagggccgtgctcagcttgttctgcagaagtagagtccttgtcccttttgtgtggatgtgctcagccgaatctcagcaaaagtcatgaacagaaaggagaggcgggctgcataagccggcggagtgcacatccgtctggacaaatggattttccggaggatggagaagagacgggggtgtccacgtgatgagaaacatctggatacgcgctggaaaaatcaatctgatttctctgtgcttcccaagatccaggtgtttacaattgtgtaggcaaagcgtctgaatgttaatgaagtctttcctctcaatatcctgcatctccctcagcaagaggcaaatgaaaactaggctcagcaggcctgggagagacggggagcaggaggaggaactagagagacccaggcagaggaagccgggaaatggaactgggagatcacactcgcccagtcggggtttctgctcccaggaaggagatggaggcaacagggcaagaaagacacgtgcatttttcacagttcagtcgaaaccataatcatattaatatgtttgtggatgctaagacgttggctataagcatcaaatacttttcaaaggaagaggcaggggacgtggcatcgtgaaaaatagcaccaattttccatttgattgtaagctctttagcactccaggagggtagaacctcgacagcgtcttctcttttaggaggtgcagagactgcccagggccagcacaaaagcatggattcaggtcctggggctgccacaacaaagtcccacaaaaccagaggctgaaaacacagaaacttattctctcacagttctggaggccaggtgtttgaaatcaaggtgtcagtggggccaggctctctcaaaaggctccagggggactccctcccgtgcttccctcctcgctcctgggggccaggggcaatcccaggtactccggggcttgtggctgcgtctctctgacctccgcctctgtcttcatgcagccttctcctctgcccttctttgtacaagggcagcagtcgttggacttagggccaccctgatcctgtatgacttcatcttatctaactatacctgcaaaggtactgtgtccaaataaggcaggctctgaagttctaggtggacatgaacaggggatggggggcagctcaacccactacaaagggcttgtgaagggactcaggcaggctccggggcaggtggactccagcaatcctctgatctcctccacgtcccggacggacagggtgtcacccaggaagcactccagggacaagccattcaccatctcccctcctccagccctgggggagcctcctctactggaaaacatccttttcaacagcaaccaaattctcctctggccgtcgtccaggttggagttcagacctaccttctggagtaacgaaaaataacaaaaacagcaatcgtggctgcttcccgcaccctggagcccaagccaaccacacgcgcacacacgcacatgcacacacatgcacatgcacacacacacgtgcacacatgcatatgcacacacgcacatgcacacatatgtacatgcacacatgcacacaagcacatgcacacatgtgtgcatgcacgcatatgcacacatacacacatgcacacgcgcacacacatgcacgcgcggacatgcacacacatgcacacacatgtgcacatgcacacacgtgcacatgcacacacagggacatgcacacacgcacatgcacacatacgcacatgcacacacacgtgcacacatacgcatatgcgcacacacgcacacacgcacatgcacaaatatgtacatacacgcacgcacacagacatgcacacacacggacatggacacacacggacatacacacacatgcacacatgcccacatgcacacacacggacatgcacacacgcacgtgcacacatgcacatgcacacatgcgcacacacatgcacacgtgcacacacgcacgtgcacacacgcgcacacacatgcgcatacgtgcacatgcatacgcgcacatgcacacacgcatgcacacatgtgcacacccgcgcgtgcacacacgcacgcacacacacgcacgcacgcacacatgcacacacgcacatgcacacacgcacacgcacacacacggacatgcacacacgcacatgcacacacgcacatgcacacatgtgcccatgccgtcctgtaggtatttctcaggcgaccccctccacaccctgatgccctcctggaaccccacatgattctctgggggttcctcaatggtcccagaacctggctccaccctccacagcagggcaaacggcagagaagggttatcattcctgcccttgggacccaggctgtccactgtgacgtccttagctgccacatcacacccgatctcatttcaggctggtttcttctacgccgttcctggggacatccagacatcagtggggtacttctcttactcctgttaaagttaatccaacttctttttttttttttttttgagatggagtctcattctgttgcccaggtgggagtgcagtggcacaatctcagctcactgcaagctccacctcccaggttcaagtgactctcctgcctcagcctcccaagtagctgggactacaggcacgtgccaccacgcccggcttatttttctatttttagtagagatgtggtttcaccatgctggccaggcgggtctcgaactcctgacctcaggtgatccgcccgcctcggcctcccaaagtgctggaattacaggtgtgagccaccacgcccagcctgtccttcactttgtattatcccaaagttgaaacccagcaccgaagggcttgatccaagctgggggaaaccgttgagcaggaatggagccctgagcaaccctgcaaagccaacgatacccagcgagggggccatcctgaatctacacattttcaaggtgcagatattaaataaccatagtaaaagcacgtctctaccaacaggcagaagtgagacttcactgaatcatgttggtcgttagagtttgcaatacactgagtgcctgggtggcaaattctgacctgtacaagtgtccatgaacttctcagtgatgactgtcgggtcaatgtcagtttcatcggggcataacccagtgtccttcagaaaccaagtgcgggagtcgtgcatgtcactaaatgttcatgcgtgcctgcaggactcaggggcacgtggctgtgtgggatgcagcctctatgggaagcttgctgctagcactgctagcacgtgttactaggtgtacacaggctaacccagtcaccacccacaaaggcagcagctgctggtggctgctctcacccgtgtgaagacacacacatcatacaagatcgagcgtgtgttcatgacaccgcttaagagacacccgaatccggggagaaggataagggacaggctgcagagaagaccgcaagctaatctcagacctctcagaccctgaactgtgcgtgtctttgaattcacccttaatgtaaatttcattctccttagttcaagatctttcaaaagtagggcttttctaaggtgtcctttcattctcattctcctcctggagactctctgtgggtttctcttcagccatgcacatgttactaggtatacacaggctaacccagtcaccacccacaaaggcagcagctgctggccaccaccgccagccagactcacatcttggcacaccttcagaccgcctgcccgtggagcctgatggggtggggggtggcaggaccgagccccctccttccagttccaacctgctcttggagaagcatctgtcacggggagtggcagccccgtaccctgcaccctccccgggctctccctgcctccccgagactcagccagaggaggtggggctgggaggtggcctctccctctcacagggccagaccaccactgctctccctcccccaggtctgagttggctcaggccaccgtctcagaggaccgcagactgtggatgtaaacattcattctcccgcagatcttgaggccagacgtccaagatggagatgtcagcaggacggcttccttcggaggcctctctccttgctctcagctggccgtcccctccctgtgtcctccacagccgtccccatgtggcctgcattctacattccctcttccactgaggacaccagtcaggttggattggggcccatcccaccacctcatttcacctgaatcacctcttcaaagatcctctctccaaacacggtcacacgcagaggtcctgggagttaggacggcaccatatagattttgaggggcccatgatatacctgtttcttctactaatgtctttattccaacacagccacagtggttcctgttctgcaaacgtggcagagcctccgctcctccccttccccagctgccactccccatcagccacaggccccatctctaccacgccctgtcctcagtgccctcctggcctccccactgccctgcctcagcccagaccctcagctccctcccctacactcatgtacacctgaccggggagccagaaacgtgccccagccctgttactgccccagcagaatccttcccagctgaagaagagactgcctccactcaggatccttccctgacctctgcaggtgtgctcatccccatctacagatgaagaaactgaggacttgatagacgcagagcaaggtatggggtcaaggctgaacttctagaagcaaccaaaactaccaaaaaactggttcaagaacaccaccatgcccactgctgcccacagcctgggcgctgagtttgagataccccacaggagggaggtagaatactggccccaaaatgtccacgtcctaacccctggaacctgtgactatcttaggttacacagcaaggaggaaggaaggttccagatgggattggggttgctcactggtgaccttgagatgggaggtgatcctggatgatccaggtggcccaacgtaaccacagggtccttaaaagtggaagaggagactgggcgcagtggctcagacctgtaatcccagcactttgggaggccaaggcggggtggattgcttgaggtcaggagtttgagaccagcctggccaacatggtgaaacgctgtctctactaaaaaataaataaataaaaaattagccaggcatggtggcccacacctgcaatcccagctacttaggaggctgaggcaggagaatcgcttgaacccaggagatggggattgcagtcagccaagactgcaccactgcactccagcctgagcaacaagagctaaactctgtctctaaaaaaaaaaaaaaaaaaagtggaggaggcaagagagtcggtgtcagagacaatgtgatgatggaggtgggtcggagagagctgtgctgctggctccgcagggtgagggcttccatcttgaagaaggaagagggagctgggagccaaggagcgcaagcagcctccagagactagaagaggcccggaaacagaccgcacctttgacactccagaagggaatgcagcctttctgcattttagcccagagaggccagtgtcggacttctgacctccagaacggcaagataatgaacttctgtgttttaagccactaggtttgttgcagtttgttacggtagtcctagaaaacttaatctaccacttctacaccaagaagggtgacgcttcaaccaccccagtacagcttcctagagaggggaggcctcatctccttccccgagacccgtcagctcccggatcagggtctgccatggacacacctgcctggccaagtccgggccacatggctggccttagctgcaggggaggctggggaagggagggaggctggggaagggagggaggcagccctcaccctactaagttccatcattccagaaagtcctccatcacagagaggcctccagttgccaggcagccagaaagacagggaggagctccagggcagggggtttggtggaatctggagactcaagtccaacagcgaccacagagccctctcagagaccagcaagtccgaactaaatccagagccgagcgaagggagcagctcaccctggtgcctagcaccacctcagtcctctgtctctgttgaggattttctcgggacctgcttctcttgtgtccaggatggccaaggtgcttcggcacttctggaagtaagggccctgccgaccctccactcacaggcagcccttggagcctgcagacgcctctcccatgtcactgaggttctcccacctctgaactcacccttagaaggcacccccgccccccaccccccgccccatccctcgaggagaaccatccggagctcccactttgggcacactcactgccagccaagctcaaggaaggggtccccaccacgaagcgccccaagggcaggactcctgccctgtgtactcagagactggggaaggcagcatgtgtgtgtgtttaaagggcgtgattgaggtgtgactggcatatggcacacctcccatggttaaagggtacagtttatgcgctatgacatgcagatatgcccgtgaaaccatcaccaccatcaggatagggaacatatccgtcacccccaaggtttcctcctgccctgatgtgccctcctcctcctcctccctctccctgtattccccacccccgggcaaccactgccttgctgtctgtccctgtacatgagtttgccttttctggagtttatataagtgaaatgacacagtacatacttctttgttgcctggctgccttccctcagcaccattccccagagatgcggccatgcccttgcctgcaccaaaggttcactccttttcattgctgagtagtattccatcgcatggatgtgctacaatttgcttagctgctgttggtgtacatttatctccaggttaggggtatcgtaaatcaaggcactatcaacatttggatggacatgtgcttttatttttaaaaataagtgagtttggggccaggcgtggtggctcacacctgtaatcccagcattttgggaggctgagtgggggcggatcacctgaggtcaggaattcgagaccagcctggccaacatggtgaaatcccatctctactaaaaatacaaaaatcacctgggcatggcactaggtgcccataatcccagctactcaggaggctgaggcaggagaattgcttgaacccgggaggtggaagttgcagtgagccgaaatcgagccattgcactccagcctgagcaacaagagcaaaactccgtctcaaaaataaataaataaatgagttgggtaaaggtgggcatgtggcccactctcactcgcccacacacgtgcgcagacgggggtggctgcggccgctagggcatgggaggcagcgccccttaccaccagcagaagccccaactttgagagcgagggggtttggggggacgaggtgctgtttatggttttgcagttgctccaggggaaaggcgggctaatgaacagttagtgggaaatagtttattgaagtgaacagaacaagaatacattaaaattattaagactgtggcctggggcagtaagcggcatcctgttttctcatagtttacatgacagtgggagaacacaggaagtggggggaggatgctgggggcaaggagatgcagggaggcctctgccaagggtcaggtggaccagaaacttccctggactcatcctccaaaagttagcatcttctagcagaccctccaacctttgcacctcccaccccatcccattccgtccacagcagtgcctcctagccacttctctttgcttattaacaaaagaaaagggggaaagccttccttcccagctagggcaggatgctgtctcatcacctgtctcagcgggccacgccagtaagcaggaagcggccactgtcgcttctgcagggaaggaatgggcttcccggtgtctccggggcttaatactaaaatcatcatcccccgtctggaaccaggattctcacggccccatctgcattctccttttttgtgccaatagcaggattctcgatattcagctgggcacctcatcgtccaggataaagaccacgcctcccgggctgggtgtgagtctgtgactactctcccaccgatgggatatacacagaagtgacagctccagctcccgggtcacacactgaagggggcatccccccatctctaccgcatgtttgcaatgcggtgaattgtgagccttcttgggccaagcatgtgggccgacacccttaggatggggagtcccgagagagaaggtgctcgagcctccggtgacctcccggggctcagccacctgcctccagatggtcacttctgagaaaattaacttctgatctgtggaagacccatggaagcctggagcctcggtcatgctcagcctcatgtatgtcttaacggaaacaccatttctatctcaattcagcctcgagcctcagaatgaaacaggaagatgcacccagcaaataatacttttggcatgttactaataaaataaggaaaggaaaaacctggggctcagacggtcatctgatttgccaacagccacacacggaggtgtgaccaggctggggactgcaggagccctggcccttccctgtccagggaatgtgccctctgaggagcctggtctgttattctgtttccagcagtagtaatcaaggaccctgggctcccaggtgactttgaccagtgcctccacctgatgccaccttccccccaggtgcatcttcaacatagcttcccccaccccctggagtgtccagctgggcacaaccaggccccatggcacctgagaaataggaacacagcctccccggtgaagtagaggagagtttaagccaggactttgcctgtgccgagggcctgggagccgggctcagctctgcctgcctgccagggatgggaccagggctcggctttctcctctgctaacaggaaagaccccataagccctcaggcctgactccaggagtgagacctgtgattctatgtgaaacagccccaggctgcccacagcaagccaaagaataagagcccgcgcctctccaaggatccgagacccaagcagcctggtgccttctgcaaaacctcttcctgcttctcttctgcagggagcagcggcgtaggtggctggggtggtagggaggagaggtgagctgcttattgctggagatgactttcctctctcctcctccttctctgggcagctcgttttttccaaaataactcttcttcctccctccccaggttgctagtttctgtctcctccaggcttccaagtgccccctgcaagggcagccggcggagggagcaggggagggcttacgttctcaagatgcagaagtacaagcgtagacaaaagagacccccacggtccccgtcaaccccctcacctctgtttgagcccccatcactcccctgggctgcctctctctgctggcggcagaacaactgcacagaggctctgctcaggcctgctccccgcccaagggtcctcacagcatcccaggcctcagagaaagcggctgctttaagcatttaaaagctcctacaggctcaactccccctcctctgttccaggacccccaactccaaacaaacaggtgtgctgatctatgcttgaccaggccggagccctggtccccagctgcccttggctcaagtcaccctcccagcctagcacatccttctgttccccaccccaaacaaggacagacctagggatgaccaaccccggcctggccccaatgcgcttcctgctcagacctctgcaaacctgatcgtttccccctcgaagactcccctggattgtgggacaccagttctgatctgagatcttagggctaacacaggaaattaggggatgggtgcatagatgcaatccctgcttcatcacaaggccgcagagtccttgtctgccatgacgtgcccgggtttagactgaagaggcaggagctggggccagcgaggggagccctgaactccattccttttaattgaggcgaaatttatataacataaaagtagccatttaaagtgtgcaattgaggggcactcggtgcattcaccatgttttgtagccagcacctctatcttgctgcaccttccatcatcccagaaggaaagaccttacccatgaggcagcaattccctgtctcccaccactggactttgtgtttccttggaaagcttttgatccgagtgccaatctgccctccagaaaggcagattgtctatttgatgataaatagacaaaaggcaactttcttctattattcttgtttcacagcaccggccctttggaataggagcatcacactgcccttgtcccctgggcttgaccactgccccaagcaacacgagggggcatgaagaccacagcagtgtcctgagctgccttcgtgatccactttgctatttgcccaaagaaaggagtagctcatgcagggcctttgttcattcattgattcaacaactattctttgccacctttgaagtgaccggctctggggcaggcagaggggcccacaggcacgagcaagatgcaatcctgcccccgcgccctgggtgtggagttggggagacaggtgggtgaacagccagataacaagtccacctggtaagtgctctgagaaaaacctgaagaaataatcaacctatagggtggctttgccatcttctccaaatattgtcctccaaatttcatgcagccatcttcacctcccaggccatctttaactaccaaagccagggccacacatgctgggtgacacctcagcatgcagggacttgaagaggccactcacaaaagaagactgagaaatgactccaaagcagggacagtgtcgaatcccaccagtcaccaaagcaaagcaaatcaaaacaaaagcccacttccattttttccacctgccagattttgaaaatgcccattgcacccagtgcttcagggggtgcggggaaatgacctctcattcgcttgctggtgggattcggagtcagtgtaatctttctggagggcagattggcactcggatcaaaagctttccaaatgtgtttaacctttaactcggcaattccacttataggaatttaccctaaggagaaactcaggaacaaacacaaagacttatctggaaagatttatgtactagaatatttgcaccattgctcataacatcaaaagattgaaaacaaactaaatgtccaactccagggtgcttggtaaataatttgtgcactcattaaaaatcctattgtagaagaatattgaatgccattgcaaagtgtttataaaccattaaatgaaaagatttataaaacagaatgtgcaaagcaatcccattatactccccaggcctccgaagcaggctggaaggacacactcctgggcctggcagtggtttcctctgtgtaagtggacgacgggctattttgtattttcttttttgaattttatgattatattctaaattttctacattggatctgaatcgtatttgtaattaagaaaactataaggaaaaattttttaacttggtaaggcatgtcatggatccagtttctcccccaaggtaccagctcacaggggaaggaagactaaaggactgcctcctgatgaacgtgggggtccgcctgtagggtttccacgatgctcgagaaccccgcagagtctcaggcctttgaccaagaagactccagagtgagcgccttagggaaacacggtcggccaagcatgcagcacctccgtgcccagactggatacggcactaatgatgcaaacaagtcatcgctcagtcagggagatgggtcattgttgctgttgtttttatttgttgttcagtggccagatgcaaacgtgttgcataagagccacccagaggcggcttgagctcttctcggaggaaatgtgggtactgtgttgcttgatcctgcctcttgacagtcctttccagattcaagtttaaatgggtttgccggtatcaggatgttaggggctctccaaatgccagtggagcaaatggcccattgcagacacatttccaaccctcatcaggggcttctcaggaaaaggcccagcccgtgttaattattatttgaacacaagttctggaagtttcatccttacaaaatatttttaacgctcgtggttcaggagaggaagggagagaagtgagtaacacttactgactccctactatgcactaggcacctaacgtgtattttctcgtttaaccctcaaaataatgcagcgggtctgcattattgaccccagtttacagttgtggaaactgagtctctgagagtctaagtgacccagacctgcaaggtttgctcagcacccagtagcaggcttcccccagagcaagcaacccggaaaagcacgacagcccccgccccacgaggtggaggccacagtctcttcagaacctcatggccagggacggccgtcagagccagagtccactcagacagcaaagcaagtcgtctctccactacctcacgccagtgcctcttgcatttggattaaccagggtgatttctaaatctggacgtccatcctgcagcccacacagggtgcagtcaaccctctggggtgggactcgcatcaggacgttgaaacctccccaggcggctccagtgtgagaaccactgcagatgtgggaaggaaccctccagccttcaaatcaccacatcatctgcctcggccatctcaagaaattcatcaggaagtgtgggtctaaacactctatagatgcccccagggtcaagaaggagacacgggcagtgagagtgattccaggaagaaagtcgttgactgcaattcacacggtgcacgggcctatttggaggcttagggaggacccagatgtgaatttacaagccagtgtcagacaccagcttgtacactcatctgcctttcagggactaggtcctcccagaccaggaagacatccaccttcagcgtccagactggggtccatgagggaccggccagggctgaccacacggggcctgggaggcaccaccttccccaccatttctcatggtattgacctttgattatgttctcaaggcaccgaggaagtgtcttctcaccgcagtgtctcaggaattccctgcaaccctccccagtggctcacctctcaggaggagctgcccacacttccctagagcgggggccagaagatggagaaatgatggagacccatcttcacgggcctagctccaggacacaggcagacccagccaccctcaggctgctccccctggaagaaggatgccagctctgtggggtccctggagtgtcgtttataattgcccttgcacagcaccctgacggagggtacccagcagatccctcaaggttctccctgcccccagagaatgaacagctcacggacagcagagctccgtgtcatccgcctcctgccagggcacaggggatcctggcagccgatgtgccgtggtgcctgcggcagggcaggctgcgcagggagacagcgagccctccgcgctgcaggaatgtgggcctccttccttgagaatgcaacatttcagcaaccaagagacaactctattgggagaacaagagctaattaaatttactgggatcactgaagatgaaattatttaatattctgaacagaatttaatatttgaaagcacgaacagccttggttcgttgtagacgggttttccatcacctgggtctgcattaggaggatccgtatacagatgaggggtggggccggggatgtgctgcttctggaaaccagaggagatgggagaggaactggaaatgggcaggaggacaaagtcctcttcgggatcctggatgattctgctccacgtttccagagggacccctgttggtgcctctaaagtgatggaaaatcacagttgtggtgccaggaccccatgtctggggtctctgaccactgcctgcctccgctccacctatctctaacccagggtcattgctggccaagtcacatggtgaagtcagaggatccggaagccagtgctcttccctggcatgcacgagtccccggccacacgctcctgtggcggagtacagtggctcacacctgtaatcccagcacttccggaggctgaggcaggcagatcctttgagcccaggagtctgagaccagcctgggcaacatagcaagaccacgtatctactaaaaaaaaaaaaaaaaaaaagttagcaaggcctgatggtgcacacctgtggttccagctacttaggaggctaagtaaggcaggaggatggcttgggcctggaggtcaaggctacagtgagctgtgatcacaacactgtactccagcctgggcaacagagcaagaccctgccttgaaaaatttcatttaaaacactcctgtattccacaggggacactgaaagagagatgggcacttttaccaagtccctgagatacccaagtttggacccagtcaggaatttctcagccatttttcctaaagtcactctgcagaccatccacgaagttcctcaaggagagtttctcctaaaggagctgtcggcccatgttggcaacgccccacagtgttcacggggccatgactcggcctccagagtccggggctcggtttccccagataccctggaaaaactgtgagtacagagcccaggagccacagctaagactcagccacctggggctcctgcatgggcaaagtggccgccagaagactccctggagagcttgactgtggggccccaggccagagccactgtcagtgccagcgggcaaggccaccaccaaccggagaagctctgggctcaggtcattccgggtgcaccccctccccggggcggcagctgcagggagaacacagaacgcgtgtccaccgtagggaggtgggctgggtgggcaggccccagtgtgagccctgcagggccctggtctcatggatgcacaggtgagccacctcctcactgcctgatcaaaccccagatgggcagatgcctccgcaggcccccagtgggacttggtgccagccagactccagcggctgtttttttttttaactgtaacggattctgtgtgctccacaccctgagggcctggagactggacatgctttgtaactgaaattagaagtcaataaaccgagggccaggtgggtcagtagaatttccatcgtgaggcatcggaggctgctctcggcacatcagccctggctccttctctcatccttccaacccttcaccccagtgagtgggagtttctaagagccccgtgtcctgatgtgccacccttggaagaacaaaaccctgagacaaactcgtattttgctttttttaattgtctctcccactttgcttcctgttcaaacagattatcatgcacatctgtaatccccacttaagcacctaagaccccctctaaaataacccattaatccattcccactcctgtctgctgctattaacatgtttgtcttcgacgcctttggcagctcatccccttcctcaccgggcttatctgccttgcccggcattgggcatcccatccagaggtgggaggggtggcagcctggagccctggaggccagggccacctccacacctctcccatgcttcccagacgccaccctcacactctgctttctgtactggtgaaggagacaggtaagaactgcagatccatctgcccttggccatgggtcagccctgcccacctcaccgccagagccactggtgagcaggaaaggctggggcacctcccctcgtctaccagtaggaaaagagtgaatcccacttccacccacaccctctattccattccaggggatccaaaggccttccgcccctgctgtcctcaagacaggctaaaacccacacccaaagtgggctttctgggccaaccaactatggacacagtacatagcctgcaaagcctccttggacatcagagctgccccagaaccccggcgttcccatagacccgcaaatggggttctatagagcacccactgcatgtccgactctgtctaaagaccgtgggtaacacagaagcatgaggcacagagggtcctcagggagccttcagggtaattgaccaactcacccctaagacaacgggagggagcacatgggctgtgagtgtcttggctgcacacagagaggcctactgttctgccatttcccatcctcatgtcctggaactttccttccatttcctcaattataaaactggggagcaatggctcacacctgtaatcccagcactttgggaggccgaggcgggtagatcacttgaggtcaggagttcgagaccaccctggccaacatgatgaaactctgtctctactaaaattacaaaaattagccaggtgtggtggcatgcacctgtaatcccagctactcaggaggttgaggcaggagaattgcttgaacccaggaggcagaggttgcagcaagccgagatcaccccactgcattccagcttgggcaataaagcgagactccatctcaaaaaaaaaaaaaaaaaaaaaaaaaaaaaaaaaaaaaaaaaacgttggcactgacatagatgatatctaaggttccttctggctctcaaattgtctgcttctgtaattcagatctgagcagtgaggcatgggtaagacactcccagagtctcagggatgcctggttaagggctggagggggcatggaaggcttcctggcatcaccaggatgcagcccagatactcatgggccctggcacctggaaccatctgctcaaaggcatcacgtggcaacctgatcgtcccatcatcttccaaagcctcagaagagcagctgagaaggatcctgggagccctgtcctgttacataggagcttccctgccacgttcccttcctgcctcctcccagacgattctcttggatgcaaagcaagaatctgaggaggctgagagaaagtcactttcaccagatgataatattacacatcattttaaaatctgagcatggagaatggttaaatgctgtgtaaaacatagaagacattaaaggaaaaacttctggctaaaaacaaacaacttctgtactggaaaaaatagagactataaacaaagttaaaagaaatattacacagtgggggagagatttatatcccatataacaaaagattgatttccttcataaacaaaaagttacggcaaattaagaagtaaagcatgaacaacgagtgggaaaaatgctgtttcacagaaaaatataaatggtcattaaacataggaaaagaggctccacctcattcatcattaaagaaattcaactaatagcaagttacgattattaagtgtcaaagtggcaaaaatattaaataataccaggatagaacaaggttctgagcaaaaagacaccatttgatacatggtaggtaagtctataaattgataaacccacgtggaagacctatttggtgatatttattattttttaaatgtttgtgcctttgatctgaaaattccatttccaggaatctatcccactgatttaccctgacaagtaagccaaggtggacatacaatgcataaatgcaacagaagcaggaaatatactatagggtgagggggagtattttcaaagtgagatagagctatatgtgctgatagaacactatatccaagatatattgtgaccaaaaaacagtacacataaaattccatttatgtagagaaaaagggattataaaggattatgtgtgtgtgtgcatgattttctgaatatacctatatatataattttctgaaaaaaatacactaccaattttactgctgggccatgggaataaagggggcattaagaaaggtcaaccagggagactttagttttcattttttaacttttctatactgttttcatgtttttgctatgatcaaatataattttttaatagaaaaattgttttaagagagatttttctttaaaatggttttaagaacagaagtaaaagtgtttacttttacttaacttcaatcgcatacaaaactcttttgtatgcaatgtgatcagctttaaatggactattataactataagatgttttatgtaagcctcactgtaatcacaaggagtaaaatctctagtggatacacaaaagcaaaaggaatcaaagtatgccactataaaaaaatcaacaaatcatgaaggaaggcaggaagaaagaaaaaaaggaactacaaaacaatcagaaaacaaattaataaaatgacaagagtaagtttttgcttataaacatttacattacatgtaaatagactaaattctccaaacataagatgtagaatgtctgagtggatttaaaaaaaacaagattcaacaacatgctgcctataagagactcgttttagctttaaggatgcacatagactgaaagtaaagcgatgggaaaggatattccatacaaatgataacatgggtggctatgcttatgtcagataaaatagactttaagtcaaaaactgttataagagaaaaaggttactatataatgataaaagggtcatttctacaagagatataacaaatataagtctatatgcactcaacatcagatcacctaaatatataaagcaaacattgaaagagctaaagggagtgatagacagcaatataacagtagtaggggactttaatatctcactctctatagtggacagatgattcagaaagaaaatcaataaggaaacagcaaaactaagcaacagtatagaccaaaagaacctaacacatatacagaactttctactcaatagcagaaaaatatacatttttctcaagtgcacttggaacattctccaggatagatcacatgttaggtcacaaaaaaattttaacaaattcggctaatgtctgtaatcccagcactttgggaggctgaggggggtggatcacctgaggtcaggagttcgagaccagcctggctaacatggtgaaaccccgtttctattaaaaatacaaaaaattagcctggcgtggtggcacacacctgtaatcccagctactcaggaggatgaggcaggagaatcacttgaacccaggaggtggaggttgcagtgagccgagatcacaccattgaactccagcttgggcaacaagagcaaaactctgtcaagaaagggaagggaaggggagcgaaggcgaagggaagggaggggaggggaggggagaggagaggaggggaggggaagggaggggaagggaggggaagagaagggaagggaagggaagggaagggaagggaagggaaggggaaaagggaaaggaaaggaattttaacaaattcaagatgatctaaattattccaagtaccttctctgaccacaatgagaagaaactagaaatcaataacaataagaaaattagaaaattcacaaatatgtggaaactaaataacacatacttgagcaaccattggacaaaagaggaaatcaaaagggaattttaaaaatatctcaagacaaaaacaaaaacacaatacaccaaaatgtatgggatatagcaaaagcagttccaagaggaaagcttattaaaataaatgcctacatttttaaaaagaagaagaaagattccaaataaacaactactttatatctcaaggaagtagaaaaagagaaaactgagctcaaatatagtagaagaagggaaataataaggattagagcagacataagtcaaatagagaatagaaaaacaataggtaaaattaacaaaactgagttggttttttttttttttttaaataaaataaaattgacaaacccttagcaatacaaagaaagagagaaggctcaaataaataaagtcagaaattttaaaagaggtattaaaatgaatgtctctgaaataaaaaagattataagggactatcatgtataattatatgccaacaaatgggataatctagaagaaatgcataaatttttagaaacatgccacctaccaaaactgagtcaggaagaaatagaaagcctaaacatcctatagtttggatgtttgtctcctccaatctcatgttgaaatctgatccccaatgttgcaggtgggacctaatgggaggtgtttgggtcacaggagtggatccttcatgaatacgttaatgccctttcttagggaagaggggtgagcaagttcttgctctattagttcctgtgaaagctggttgttataaagagcctggcacctccccacttgctctctcttgcttcctctcctgccatgtgatctctgcacaagccagctccccttcaccttctacatgagtggcagcaacctgaggccctcatgagaagcagatgctggcatcacactttttgtagtctgtgagccaaataaatctcttttctttataaattacccatgctcagctattttatagcaagacaaaatggactaaaatacagaaaaatatcaaagaaggagactgaatcagtaatcaaaaaccactcaacaaagaaaagccctgaatcaaatggcttcacagttgaattatatggaacaatcaaagaactaatactagttcttcttaaagtcttccaaaaaatagaaaaagagggaacacttccaagctaattttatttatttttttattttttattgtttatttttttttgagacagagtctcactctgtcgcccaggctggagtgcagcggcgcaatctcggctcactgcaagctctgcctcccaggttcacgccattctcctgcctcagcctcccaagtagctgggactacaggcacccaccaccgcgcccggctaatttttttggtatttttagtagagatggggtttcactgtgttagccaggatggtctcaatctcctgacctcgtgatctgcctaccttggcctcccaaagtgctgggattacaggcgtgagccaccgcacccagccccaagctaattttatgaggctagcatcaccctaatagcacagtcagacaaagacaccacaagaaatgaaaactacagggcaatatctctgatgaacatagatgcaaaaaaattcccaataagatactagtaaactgaactcaacaacacattaaaaggattatacattatgaccaagtggaatttatccctggaatgcaagaatggttcaacatacataaatcaatgttatatactacattaacagaatgaaagggaaaatctatataatcatctaaatagacatagaaaaagcatctgacaaagtttaacatccattcatgattaaaactctcaacaaaatagctatagaagaaacttacctcaacacagtaaaagcccataactaatatcataatcaatgggaaaaaaactgaaagccttactataagatctggtgcgagtaaaggatgcccactcccatcatttctattcaacgtagtacaggaagttctagccagtgctattagacaagaaaaagaaataaaagcatccaaatcagaaagaagtaaatttttttctatttgcagatggcaagatgatatacgtagaaaaccctaaaaactcaacaaccaaaaaactgctttaaaaaattctgtaaaattacagaatacaaagtcaacatacaaagatcaattgtgtttctatacacaacaattaagtatgtgaaaaggaaattaagaaagtaatcccattcacaatagcaacaaaaaaagacttaggaataaacttaaagaggttgagggcttgtacagtgaaaattataaaacactgatgcaggaaattaaagaaaatagacataaatgaaaggacatcctgtgttcatggattggaataattaatatagttaaaatgtgcataccacctaccacgcaaagtgatccacaaattcagtgcaatccctatcaaaatcccgatggcattctttacaaaaacgaaaaaataatcccaaaatttgtatggaatcacaaaagatcctgaatagccaagcaattttgaacaagaacaaagcgggaggcattacacttcttgatttcaaatatcacaaagctacagtaatcaaaatattatggtactgatataaaacagatatatagaccaatcgaacaaaatagagagcccagaaataaattcattcatttataatcaacagatcttcaacaagggtgccaaaaacacacaatggagaaaggctaatctctttaataactggtgtttaaaaaaactgaagattcacatacaggagaataaaactggactctcacctcactccatacacaaaaatcaacttaaaatggattaaagacatacatgtaagacccaaagccataaaactactagaagaaaacatagggaaaaaaacttcttaacattggtctggccaatgatttttttggatatgacaccaaaagcataggcaataattctaaaaataagtgagattgcatcaaactaaaaagcttctgcataacaaaggaaacaataaagccagggtgaaaaggaaagctatagaatgggaggaatatttgcaaatcatatatctaacaagaagttaatatccaaaatatataaggaactcaaacaacttaatagcaaagaaacaaataacccaagtttaaaatgggctaagtacttgaatgacatttctcaaaagaagtcatacaaatggccaataggtatatgaaaaggtggtcattattaactatcagagaaatgcaaagcaaaaccacagttagatattccctcacacttgttaggatggctattatcaaaaagacaaaagataacaagtatgggcaaggatgcgaagaaaagggaaaccttgtacattgttggtagaaatgtatgttggtacagccattagggaaaacagtatggagtccttaaaaattaaaaatagaactaccatatgatccagcaagactacttctaggtatatattcaaagaaaatgaaatcagtttctcaaagagacaactgcacccccatgtttattgcagcattattcacaattgccaagatatggaaatgggaaacaacttaagtgtccatcagtaaatgaatggttaaagaagacgttacatacataatagaaaactattcagcctttaaaaagaagaaaatcctgccatttgcaacaacacaaatgaacctggaggactgatatgatttggatctgtgtccccacccaaatctcatgtctaattctaatccccaatgttggaggaggggcctggtgggaagtgattggattatgggggaggtttctcatgttttaacaccatctcccttggtgctgttgtgctgataatgagttctcatgagacctggttgtttaaaaatgtgtggcaccttcccctctctcttcctcttgctctggccatgtaaagtgctagctccccctgcaccttccaccatgattataagtttcctgaggcctccccagaagcagatgccaccatgcttcctgtacaacctgcagaactgtgaaccaattaaacctctttttttaatgagttacccagtctcaggaatttctttatggcaaagtaagaatggactagtacaaggacattatgttaagtgaaataagccagacacagaatgacaaataccgcattatctcacttatatgtggaatctaaaaatgtcaaactcataaaaacaaataatagaatgatggctgccattgctgaagggtgggaggaaatgaggaggtgttggccaaaggacataaaggtccggttatgtgggataaataagttccagaaatctaatgtacattatggtgactatagttaataatagttgaaatttgccaagagggtagatttttaagtatcttcaccacaacaaaaaatactgcaactatgtgaagtgataggcatgttaatttgcttgattgcagtaaccatttcacaatgtatatatatatacaaattcatcatgttttacaccttaaatatatacaatttttatttgtcaagtatacctccataaagctagaggaaagtattttaagaaagcatgctgtcattttcttgtgaatttaatgatctctctcacttcacttttttattgttaatgtcatatgggcttattatagggaaaaaaagtataaagtctagataaagtaaaaagtacagcagacaaagctaatatataaattaaaatggaacactaaaacaaacaaagttaaccacaaagaaggccgagaaggaggtacaaatgcacgagaaacagaggacacaaacagaaaacaaataggaaaatgatagatcaattctagccatatcaataagtacgcaaaataccaatggactaaatctttcagttaaaaggtggaggttatcagctacaaatatagatcgagcactttttaaaaggcttaaaatgagcctgagcaacatagagagacctcgtctctacaaaaaattaaattagcctggcatagtggtgcactcctatagtctcagctactcaggaggctgagctgggaggatcgctcaagcccaagagttcaaggttgcagtgagctgtgatcacaccactccactctggcctgagcaacaaagttggaccctgtctctaaaaaacaaaaggcttaaaaatgataccatgctaacaataagcataagaaggctagatgggttacattaatgaaaataaattagacttgaagacaatggatattaacagaaataaagagtaacatcacgtaatattaaaagatttaatttttaggaaaatatataattcgcaagcataaagggcctaagagaagaacttcacaatacataaggaaaaagccaaaagaattaaagggagaaatctataatcatagttggaaattctaacacccctctcttgacaactgatagaacaagtcaagagaaaatctgaataacatcattaactactttgtcctaatagccatttatagaacactaaattcaacaactgccaaatactcattcttttcaagtttacatgacatattcaccaagatagatcatgtgctgggccatttttttaaaagtcttcatacatttcaaaagattgaaacttgctgaatatgttttctgaccacacggaactaaattaaaaattgatgacaataagatatatgggaaaatcccccaaatatttggaaattaaacaatacatttctaaatattctataggtcaaagtagaaatcacaaagcacattttaaaatatttcaaactgaacagtaatgaagaaacaaatatcaaaatttgtgaactatagctaaaataaagcttagagaaaatttgtagctttaatatgcttatattaaaaaagacgttctcaaattaatgaactaagcttctaccttacaaaactttttcttaaaaagtaattaaaaggaaataatacaaataatagcagaaattgagtaaatggaaaacagacaaaaagaaaattaacagagctaaaagatggttctttgaaaagatcaataaaaaaagagaaaacacaagagagatctctagaaatcctacatatattaaaaggttaataatggaatattaagaacaactttatgccaatacattcaactatttaaatgagatggacatatttctgaaaacacaacttaccaaaattgacacaagatgaaatagaacatttgagtagagattgaatacatcatcaaaaactttcccatgaaaaaatttcaggtccaggtggttttactggtgaattctatcaaaacattcaaagaagaaataattctactggaacttttgcagaaaataaagtaaaatcttcccagtatgctttatgaggccaacataactatgatatcaaaaactgataaagacattacaaagaaaagcacagactgacataactcatgaatatagaaacaaaaattctctacaaaatactagcaaaataaaattagcagtaacattgttgaattttatctcagcaatgcaaggtcttttatattaagaaatcctaaagaatctataacataactagaactaagcagtgtatttatcaagatcataatatacgtaatcaatacttaaagatcaattgtatttttatgtttagagataaaaataataaataacattttttaaatccacttgcaatgatgccacaaataataaattttaaaataggtttaataacatgtgaacgaagtgtacgttggaaattaaatatctcaggaagaaattaaaagcatctctgggcgaaagtaaagaagacctaaacaaatgaagacatatatcatgattatgtaagcagagaattccatattgctatgacgtcattttcttccactcaatatagaaattcaatgcaactgtaatcagaatcccaacaggcttctttgtagaaattgacaagctggttctaaaatttttatggaaatgtggaaggctcagaaaatggcaactttattcttccaattgttcagaaaaacaaaacacctgtagttatcctcacctcctctcttcctttcaggcttcgtgtgtaatctagcagtaaacttgtgctgactctgccttcacaatatactcagagtctaatcacttctcaccaattctgccaccactgctcagactcaagctgcccttaccgctcacctgggccatcgtgaagcccccgaacggtctccccacatccacaccccgcctttcgcttattcttctttcgctcattcttaggtcagttcatgtccctcctctgctcagaaccccaaaaccttgcgtgcaatgtccagcaagtgcacctgtgtggtgtgccccacccctcagtcccaccctcctcctcctgactagccacccgccagaaacaccgcctctttatgcgccaccaaatgccaagcacactttggccacggagaccttgcagttctggtggcccctacctggaataatcctcctcagatatcctcatgcctcttccccacccttcaagatgatgctgaatgtcaccttctaagcgaggcttgcctgaggaccctcttaagacctcataccttccagctgccccttctctccatcccctgcttccagccctacacttgccactgggtctgccaacttcccagtccagcccagggagcccaggcctggcatcacccaactgcccagcccatccctggcatcatccagttcaccgtctttcccttaaacacttgctgcctggaccgcagcggcctccttcacttaaggcacagggctgcctggccagggcagaaggagtgaagcggggttagcctgcaatgagccctcacctgacagaagaggagccctcacctggcaggcagatggggtaaagtagagggaaccttgagacacccccatggaggggcccagaaccaacctgtgaagtttgtcaggactcaaaaggaatctgcaataattcgacatccttgatttagatggatgctcctgcacctcccgcaaaaactgtttcctctctttacatccacctctctccccactctctcccttgcactaagatccacatcttctcttggtctcctggcctctccccctccaccctttcacagttagtgggcttcgggatcttgtatctcacccccaacccccagccactcccttccccagaaagacaccgtgatctgtcatgcatgtgcccaaaatgtacaattgatttttttcttaggaaactcaccttccatcccttgtcacacacactgagacccagggtattcttgcagaacaagtttgcaatgtcccaggtattgttcagaaacagatggtacaatggaaggtgttgtcagaaaacgtgacatgagaagtttaaccaaaaactgaaaaagaaaaatgagtcccattgtattagtctgttctcacactgctaatacagactgggtaattgataaagaaaagaggtttaatgaacttacagttccacataactggggaggcctcacagtcatggcagaaggcaaaggagaagcaaacgcatgtcttatgtggtagcaggcaagagagtgtgtgcaggggaactcacacttataaaaccatcagctgttgtgagacttattcactaccatgagaacaatatgggggaaactgcccccatgatttgattatctccacctggccctgcccttgacatgtggggattattataattcaaggtgagatttgggtgggggcacagccaaaccatatcacccatatcacaaagaccaaacctgacctgcccatttgctacccccaaccccaatatctctcctgtctggctctgctctgccgccagcaccctgactgtccctctgtcctgccagccaccctctgccccatgacctttgcaagtgctgatccatctgcctgacctgcttttccccagatacccacacagttcacttgctggcctcactcaggcctttgcactgcctggccttagcagagaggatggcccagtgtacaactacagcatccccagcccagcagtggagccaggggacaggggacaggccaaccccacctctcctccttgattttatttcctctgtgacattttcactgccgtgtgtgtgtgtgtgtgtgtgtgtgatctccttgcactagaatgagtgagaggacttcatctgctcatggctgagctgtagccctgatgcctagagccgtgcccagccatgcccagcaacagggcacctttcataaacaaccatgaactgagcagccgctgtcagcatcactccaccggtgtcgcctgcagaaagcctgacacatccatgggaatggctcccaggaacaacacattcccctgaaaatgggtgagttcctctctcccatagcctccagttgcccctttgaccctcctctgcctcaacgcagtgcgaggtctctgcacaggaaagcagcaatgagacccacagcacagcagctgccactcatgtcagcaatgcctccagctaattcatgcaactgccggggaggatgccttaatacctctgcacaagacagagtaattacgtctaaacatagctgcttccacactgtctccatttcccggcactgggaaatctctggcccagagtcagctctctgccatctcccccagccccgggagcctggggccatcccacatctgtgggagcaccagagaagcacatgccacacagagcaccccagcccacaggccctgctgcccctaactgcacaaggtcatggcacagcgcatgaccagggccttgtggctcagggcttcgatccacctgacccctgcctcctccccaaccttccaccccactctccaatggcccgggtcaccctgccccacccccaactcacacctgtctcccacctccagggccagtgctgtggtggacacagagcccacctgggggtggagtggtagagacagagcccacctgggggtgcagtggtggacacagagcccacctgggggtgcagtggtggacacagagcccacctgggggtgcagtggtggacacagagcccacctgggggtgcagtaggagacacagagcctcctgggggtccagcaggggacacggagcccatctcagggtgcagtggtggatgcagagctggtctgggggtgcagtagtgggcactgctagtccctccgaagcaacagttctcagagttgggagcatcaggcatggtcagacagtgtgagacgaactggatgggcctatgaatgtggtcagggacactcaagatgagctctgctcatggccagcatgggactggcaagagtacctgcaggacagggagcggtgcagatgacgtgggtaatggagacctagagcttagcttaggctgcacagtcaggacctaactcacgggcacgtcctccccagaggcaggtcacccaagaactgggccgctgaggtatgaaacagatgcctgggtttgcatcctgctctccagttaccaagctctccagacccctgcaatagcattgtggggacaggcgtggccccattgcagaggctggtaaggaggctgtgcctgaagcatgtccagcaagccctgcaaacagcaagtactccacgatgttagctgtggctgtgactctgtcatccctccacaggacctggccacctctgcctcgttggggccgatgggggcatggcagtacttcctggtattagggtccaaggacacccctcagagccatggccaggtatggaagcggttacataactccggcaggggctggggctgctctccaaatgtccccacgccatcaaggtttcccagcctcccttgcaggatgctggatccctgtggccagtgggttgcgggcagaaatgatacaagccgtttcacacctggcccttaaaaccctcttgctccagcctctcccacccacacctatgccccaccacagccacctgtggtgttacattccagatgccatggccacaggataaggaagacagctcaatcagcttagcatgagtgaaaaatgtcttttttttttttttttttgaaacatagtctcactctgtaacccaggctggagtgcagagctacaattgcagctcactgcagcctccactttatgggttcaagtgatcctcctgcctcagcctcccaagtagctgggactacaggcacacaccaccatgcctggctaattatttttattttttggtggagatggggtcttgatgattgcccaggctggtctcaaactcttagcctcaagtgatcctcccaccttggcttcccaaagtgctgggattacaggtgtgagccaccatgaccagctgagaaataaacatctactgggacaagccagtgagatgcctgggcttgtttgttagcacagaagaacctggtttatcctgactcacccaacaactttgaatgcacctacattagtctgttcttgcactgctataaagaaatacttggccaggtgtagtggttcacacccataattccagaactttgggaggccgaggcgagtggatcacctgaggtcaggagttcaagaccagcctggccaatgtggtgaaaccccgtctctacgaaaaatacaaaaactagccaggcatgatggcggaggcctgtaatcccagctactggggaggctgacgcaggagaatcacttgaacctgggaggcggaggttgcagtgggcggagatagcgccattgcacttcagccgacagagcaacactccacctcaaaaaagaaaaaaagaaatacttgaaactgggtaattttttaagaggtttaattggctcaaggttctgcaggctgtacaggaagcatgatgctggcatctgcttggcttctggggaggcctcaggaaacttacagtcatggaggcaggcgaaggggaagcaaggtatcttccatggtggagcaggaacaagcagggagggaggcgctacccactttaaacaatcagatctcacagtaactcactcactatcaggaagacagtaccaaagggtgggtgctaacccattcatgagaaaccggccccctgatccaatcacgtcccaccaggccccacctccaacattggggattacatttcaacatgagatttgagcagagacacagatccaaaccatatcagtgcctgtgcaaggacctctcatcataaaaacaatgtttctagggaaagctttgctggaagttcccaacaactgatggtgaattatccccaactaaactggggggattcgatttttccactcctttctctctctaatcacccaaaacagataagaagcagaaacagaatgaattagagagtaatgctggatgcccgggccgagggagaagggcagagctagggacctgtggggtgggccagggacggggctgctgatggcaagcaagttgatttgccctaaggaacctccaaaactcagggaaagcagaggccctgggtactttaaaggcccaggggaggccaaggcactgggggttctcataaggattctgcaccctgccagcctcattgcagccacgccgctctcccacccactgaggcgcatttccactaggacgtgaaccagagagacctggggctcagggatgccaggctcacagagcaggggacaagcacagtactgaaggactattaaacagaagtctccggcccctccactgcccaccccagaacccaggacccaccccaggcagatcagaggatgcacttctggagagactaaagctccccagagaacagacctataaatacaccgacacttaggagtcacagtagaaaggcagctgtccacccatggcccccgagggaagactgccatcgacgtcagcgcccaccagtccccggcatctccaagcgccctgcaggctccagggtggcaccagcatctccatgcctgaagcttctcctaaaacctcagaagatggctctgcctctcgtgggggtgacagggtcctggcctttaccctcggcctctccaagagccctgcacccgggactcgcctgaggtggggcataaacaccccagctccgccagcgccatccaggcaggggattccaggtgtgtgttctgcactgttcctcagaggtccctgcagggttgagttccaaacacacgcactgcaggattgagtcaccaagtcgccggtttggtgatgcaccccttcttggcggccttcccttccagggtccacgtgcccacttcccctaccagggcttcctccacctccccagtaaactgctttcccccaagccttggctcagggttggcttctggaggaacctagatagagagggtctgtgagctcctggccatcagctcgatgctgcaggtcttaaacataaggggaaagacagacagcgccagagagttgagaaaagtctccagtggacaacagcaaccaaaacaacagacaggggaagatgcggatcatgttctgtggtgccagactccaaaatggctgccttctggtggtgacacccccgggccgtcccctcccactgttccaggttggtctctgtgactgatggagtgtggcatgcaatgtgactggtgatatggcacttccgagattaagctacagaagatgctgcagcttccatcttggtttgtcctctccctttctccttttctctcttgccccctttcctctctctctctctctctctctgtctctctctctcctcccccgcctctctccctccctccttccctccccctcccccctccctccctgtctctctttccctccctctctccttctctctctgcctttctctctgtctccccctccctctccctgtccatccttctccctctccttctctgtctttctctctgtcttcttcctctctctctctcttctctctctttccccccctccaccaccccccatcactggctttgagggaagccacctgccatgtcaagcagccatatggagaggctcacgtgccgaggaactgcagctcctgccagcaaccaagtggctgagcttgggagcagatccttcatccccagtcatgccctagatgcccccagccctggcaaacatattgactgcaaattcacgacacaccccaagccagaaccacccagctaagcccaaccagatcccccgcccatggaaactgtgagataaaagccatttgctgttttaaaccattgtgtttgggggtaatttgtgacatagtaatagataactagtacaagtgtatgctttacaaagagaagaaaacttcaaagaatccattaatattgtcacagagatgagaaaagatactacatccatgaaacaagaagaaatagagaacaagaatgtttgcaagttaaatataataacataagctggggtcaatagaagtgttagaaaataaaattgatgcttgagcccaggaggtcaaggctgcagtgagttatgattgtaccagtgcactccagctggggtgacaaagcaagatcctgtctggaaagaaagagagagagagagagagaaagagagtgtgggataggtgcagaagaaaggaaaggaaaaggaaaggagaggggaggggagggggaaaagaacgagagaaagagaggaaggaaaggaaaggaaaggagaggagaggagaggagaggagaggaaaggaaaggaaaggaaagggaaaagggaaaaagaaagattgagaacatttcccaggaagcaggacaaaaaggcaaagaaatgtacagtcggtttttgtttgttttaactgaagagttaggtaatgaagccaggagttccagcatttgataaacagaagttccagagagaacagagaaaattaagggaataaaattatcaaagaaataataccataaatgtccccagaactgaaaggcattaagtcttcaggtttaagaccattccaagtgtccaaacaatgaaaactataggcacacctttatgacatttcagaacaccaaggataaaagcttccagagagaagaaaatggggccatataataggatcaaaagctgaatgtcatcaccattttctacagcagcatggaaatcagaatttagtgggaaaaaaaatgccttcgaaattctaggtaaaaataatttcaaacccaggattctgtactcaaccagactcgttaactgaacatgagaacagaataaagaggcttaggatattataagagaatgtgctccactaaggccaagcagtaaacaaaaagataaagctgctagatccaggaacatgcacgtcggcacagggttgagcaaagaaaagtcctggatgagagccctgcagctgccttaacagtaacctgtgagtgccagggcacaggtctgagggccccaggacaacttccccaggcagaaaagagggctaagatgtgttgactacgtggaaggttgtatgaaaaggcatgttggaaggtgtacaaaaccctaagccattattaactccaggataaacagaaagttgtacaacaaaaaagaaaaatgttacagttatcattgttatagtaagaaaaaccttaatgtagatttaacgaagattgaggtttcattgtttaggtgtaagtgagataaaaacccgatctaccataaaagaaagcttaaagatgaagtgtaaaaataatgaatcgatagcttcgagtgtataagcaatgttcagaaatgcagaggttaattccggaagaaacagctagcagtagaagaataggcagaagtaggaagggggaaagagaatgctggtgtttattataaatttggagcataatttcaattttaaaactatttgcatgtcgtggttttttttttaaagttagctggatttccagcactttgggaggctgaggtggaagtcttgcttgagaccaggagtttgaggccagcctaggcaacatagcaggaccctgtctctaccaccaaaaaaaaaaaaaaaaaaagttaattcagctttttaaaaactcataaaaataaaatgttagggcacctgtactggaaagtctcaccaattcatacaagttgtttggtttgtcacctgaacagtatgattttgaaagaaatactgctcttttttttttcatctccacaaagtaggttatctaaagcaagcagttttgctaaaaggataaacaagggcatgaaagaaagagggaattgtggacgtatacagcttgcaaaggccttccagttttctggtccaagccactcattcattgcacagactggtaaatcgagcaccggagaggctgtgtttaccccaagatgggtgggtaacaaccagcacagccagtctctgaccagctttcggactctccagcccctgagcccctctagactaccctccaaagaattttttcacagtgggaagactcttctagggcaggtggcctggcactgaggtcagggagcagggaaagggaagacactggaaaatgagttccagacacacctaagcaaatgaaagaagcattagaaaaggttaccttggctggggcatgtctaaaagactcagcccatgttcctgatccttttctgaagacattgaaaactctacagatcaaaaagtctacggcccagctggagaattcaaatagacatgggcaccaaccgcccccaggtacaagcccctcggtgtaagggaaggagtccctattaaggagctctaactttaacaaaatgacctgatttccaaacaaaaagaactggacttacccaggtagcagaattttgtccttcagaatcgttttagcaccttgcaggggagggccccttttttaaaatgctatctcatttggaacatctgggaattccactttgagaggtggccttcagagccaacgtaaaatccacaaggagaaaatgggtctcatcgctttatgggcctctccctctctctgaagcaacattatgcaaatgcctcctggctgcttccacaaagcgagcctaccgtctaaggactaagatctgactccgcggaaggacaggaaaaacagaataaactgtacagtctgaatgggattctagaggagagttccaaagcgactggaccatgccattagcacgagtctgaggcttagcttcccgacgaggctgttggaagggaaagcacccaagtagatgaacacaccgggccgtgagttaaatgtcgggtggaagctcaggtcagtccactctgctgagtgctattctgtgtcctgcactggtccctggggccacaggaaaagccctgcacccggaccagcacgaagagggcacaggtctgacctaagtccgcagggggaaaaagcgggagacagggaagtcactgacggtggccaggccctaggttcatgtctcagttcctggactccctgaccaggtgaccttgaggctgtgtgcccagggaaataaccacgttcccaccccccagagccatctataggactcaatgaagtaatgcataaaaattgcagtaactgtcaaatagaaagtcctcaaccaatgtaagctgtgactatgtgtccaaaccctttatcctaaattcaaaaattccaaaagctctgaaagcctaaagttttaccttctaattttggcagtaaaactcatttggcagcaaaacttgacctgagccggcaggaggccattggtggcctttactgaccctgacagggactggctgtgccttttgcttccaaaacacccatgtgtgagaatgaagtacagctccagactcactgagactcttatgaggtagaaagcaggtatggcccatgatctctctataagaaggttctggaacagtcagtgtggtcaagggatgtccaaatctgacctcaaaatcatccctcagtatggggtgtccaccaatactcctgacttagccaatgcctcctcaccccagccccacaccagtcacactcatgggagacattctcgaccttcccactgcccgacccgcctgacccatccagcccctagtcctgcttacctcagcccctaaacctctggatgccattctctaccttcttgcaggccttccagaatggccccagagccttctgcagggaccccgagggaagctttaggctgggctccccgtccctgcctcactgcctcccccgcactcttgcttctgagatcactctcaagcaaaccaccagaacccacgtccttgtcacagctctgctctgtgaacagcccaaaggaaggcagcttttcaacccaggggccggccaacttgctgtcaagggtcaggaggtgaatctgttctgcatttctggtcacattgtctctcctgcaactcctccactctacccttgtctccaaagcagccattgacaatgcacacattaatgggcgaggctgtgtgccaatgaaactttatggacaaggccgggcacggtggctcacacctgtaatcccagcactttgggaggcagaagtgggcgcataacttgaggtcaggcattcaagactagcctggccaacatggtgaaaccccatctctactaaaaatacaaaaattagccggacatggtggcgtgtgcctgtaatcgcagctattcgggaggctgagacaggagaatcggttgaacgtgggaggcggaggttgcagtgagccaagatcacaccactgcacttcagcctgggtgacagagtgagccaagaaaggaaagaaaggaagagaagaaagaaaggaagagaagaaagaaaggaagagaagaaaggaaagaaggaaggagggaaggaaggaaggaaggaaggaaggagagagagagagacagaaagaaagaaaagaaagaaagaaagaaggaaggaaggaaggaaggaaggaaggaaagaaagaaagaaagaaagaaagaaagaaaagaaagagaaagaaagaaagaaaagaaagaaagaaaagaaaagaagggaaggagggagggagggaaggaaggaaggaaggaaggagggaaggaaggaaggaaggaaggaaaagaaaagagaaatttatagacaaaaacaggcagtaggccggattttgctgtgggtggtagtttgctgacctctgttcctgttgcatccactccctctgccctgttccaacagggtctccacacagcaggtaggagggccttttcagaaggcagatctgaccatgtcaccttccaccctaagcccttcaatggctcccccactgcaccctggaagaggagaagaatgaggaggaaggggaggaaggagagaagggagaggatggggaggaagcagccacacggcaaatggaagccttctcctctgagctgatcctcagtggcctgtcctaccagctaagggggagattgcagcaggtctttaagcatccaagtcccccaccccacccccacacactcccagcatgttatcaacatcccagccacacacatcaactctgaggctggattctagaagtgagcataaagaacagagctggagctgtgcacagtggctcacgcctgtaatcctagcactttgggaggccaaggcaggtggatcacctgaggtcgggagttcaaggccagcctggccaacatggtgaaaccctgtctctactaaaaatacaacaattagccaagcatggtggcaggcaactgtagtcccagctactcaggaggctgaggcaggagaatcgcttgaatctgggaggcagaggttgcagtgagccaagatcgtgccgttgctctccagcctgggtaacagagcaagactctgtctcaaaaatgaagaacagagctggacacctggagcacccaacaggcttctgctgtgaaatgcagtgggtcaccacaaaaaatcagccttaaactacaggaaagaatgcagaggttacaatgcaggtcccaggcatctgccaagcaatgaacacggatgtttccctccgtttttaaagaaggcttaagctctctcaggcaaatgcatcagagtaacaccaaggagaaggcccagtatggccctgggccctcctggagacacagagggcatcttcaggacagagtccctcaagacgaaacgaccccaggctcactttagtggagagagagacactggctgagaacagtctgttcttctgtaagaatgacaaatgaggcccttgagtttcagtggccccaacacaagcagcacaggacttactttactcgtggtttttttaagtccaggagaatttgctactataaaagggaaggacttgcagtgcccataaaagaaagaaaacagaggatgacttagaaggaagcatggagtcactctgttccccatttcctaatttaaccaagtgaaatggtcccctcctccatttctccctccctccctgtctcctcctcctccacccttccctctctccctctctcccccatctctctctccctccctgtctcctccccctccacccctccctctctccctccctgtctcttcctcctccacccctccctctctccctctctcccgccatctctctccctctctccctccctgtctcctcctcctccacccctccctctctccctctctctttctctctcttcctgcatgtgcactccatcacacctgcacccatggataattctacccatcaccgtggccagtatcctgcctgcctggaataggcactgattactaatggagaaactgcagctcagaacagtgaagctgtcgcttgtgcagagctaagatgcaaatggtccctctccattccactgcctcctcccctgaggccagtatctctgcctccatcatccctttggcacagcaccgagtgctgcactgtcatcgcctcaggagaattttgctgagcccctactgtgtgccaggcacgtgctcattcatcggccctgaaaacacagaaacaagagcttatattctagacaaagacacagacaggaagcctacaggcaagtcacttactcaacaagataacctccatttgcaatgagcgcttcctgcactgggatagtgtaggttctgctgcagtagaaaacacactcacatctcataggtttgcggaaaggtttgtttcttgtttatatcacagtcgagtgtggtccgggcagctcttcttggcaatgctcctcctagtggtcacaccaagacccaggctcctcacatccctgagcccttcctactgacgtgagtggccgccttggtcaccgcacaggaacagggagtgtggaccacgcgggggcccgtgacaacatctggaagtggaaggcattgcttccgtctacaaccccctaaccctgacctcactgcaagggagactggaaaatagagtcctcctttaaatcttcccggaaaaagaaatagaatttggtgaacacaggcattgtctctagaataataaatgaaataaacaggatgatgtaccagagggtatctgggtcaagcggcctgttgtggatagatagggcagggaaggttgctttaagggggtgacttggatccagctaggaaagagcactcagagcccaaagaacagcaggtgcaaaagactggggcgggaaagcacctggcaagttcaaggaacagaaaggtcaaggagataggcaggtggggagcgagagtgggaagaagggagggctgtgcataggccagggcaggtggtgaccctgacatacatcagagccacaccccagacaccacgaaacctcccatgctggaccctccccactccccagagactgatccagtgattctggcctgggatcagactttatatttgttactgctttgtttaagaaaataatacatatgctcaaaagtacacaaataattagtataggctcaatgaatagtcagagtggacaatccaggcaaccaccactgagatggagaaatagaatacacagatccctggagggcccctcttccctccccttccccccagcctcccacctttctcctccctaaagggaaccactatcaagatttccatcaaaatctatgctgagtacagtggctcaagcctataatcccagcactttgggaggctgaggcgggcagatcatgtgaggtcaggagctcaagaccagcctggccaacatggtgaaaccccatctctactaaaaatataaaaatgaacagggcatggtggcgggcgcctgtaatcccagctactcaggaggctgaggctggagaatcacttgaccctggaaggcagaggttgcagtaagccaagataacaccactgcgttccagcctgggagacagaatgagatttcatctaaaataaaaaaaatcaaaaatcaaaaatctaggcaataccattcaggacataggcaggggcaaagatttcatgacaaaaacaccgaaagcaatcgcaacacaagcaaaaattgacaaatgggatctaattaaagagctctgcacagcaaaagaaactatcatcagagtgaacacacaacctacagaatgggagaaaaatttgctatctatccatctgacaaaggtctgatagccagagtctataaggaacttaaacacatttacaagaaaaaatcaaccccattaaaaagtaggcaagagatatgaacagacacatctcaaaagaaaacatacatgtggtcaagaagcatatgaaaaaaagctcaacatcactgaacattagagacatgcaaatcaaaaccacaacaagacttcttctcacaccagtcagaatggcaattattaaagtcaagaaacaacagatgctggcgaggttatggaggaaaaggaatgtttttaccctgttggtgagagtgtaaataagaagatgacgtggtgattcctcaaagatctagaggcagaaataccagttgacccagcaatcccattactgagtatatacccaaaggaatataaatcgttctattataaagatacatgcacgtgtatgcccactgcagtactattcacaattgcaaagacatggtatcaacccaaatgcccatcaatcacagattggataaagaaaacatgatacatatataccatggaatattatgcagccaaaaaaaggaatgagaacatgtcctttgctgggatgtggatggagctggaagccattatccttagtaaactaacacaggaacagaaaaccaaacacaacatgttcttataagtaggagctgaatgatgagaacacatggacacagggttgggggaataacacacactgaggcctgttgggcagggggagggagagcatcaggaagaatagctaatggattctgggcttaatacttaggtgatgggacgagctgtgcagcaaactaccacagcacacatctacctatgtaacaaacctacacatcctgcacatgtacccatgaacttaaaataaaagttgaagattttttttaaaaaaggttaaaaaaaaaagatttccatcttgcccatttctgaacttcacatgagtggaatgcctggattctttgattctacattatttggtgaggttcatagagtatagatgtgctgtttagtgtttagtgttcatagagtgtagttctgtttagaatcataattgtgtgatttcacaatttatttggccacactactgtgttgcttggcctgggttacttcaagcttgaagttgtgaaaaacagtgctgctgtggtcacactcatgcacacatttcagtgcatctgggcttgcatttctggcaggtgatatctagggatagagtagctgggttctggggcaggtgtatgttcacctttagtagattctgctaaacagtcttccaaagtgattgttcccatttacattcctaccagcaatatagggatgccccaatcattctatatttctagcaacccttaggactggcaacctattcactgtagccattccagtgtctagatggcagtatctggttctacctgatgactagtaaagcacttggtgaagtgcttgttcaagtctttttcccatttttctgtgagcccttttttggtgacatatgttgccaatatcttcttccacttggtccttgcctttttgctctcttaattgtaccctttgattgtgcccattgctcttattcttaatataatctgatttgttaatatttccccttgtggttaatattctttgaatcatgaagatattctacatcttctgtgttatcttctagaagacagatttttttttgatacagtgtgaggtagggatcaagcttcctgtttattctttttttttttgagtcggagtctcactcactccaggctggagtgcggtggtgcaatctctgctcactgcaagctctgcctcctgggttcacaccattctcctgcctcagcctcctgagtagctgggactacaggcgcccaccaccacacctggctaattttttgtatttctagtagagacagggtttcaccatgttagccaggatggtctcaatctcctgaccttgtgatccgcccacctcagcctcccaaagtgctgggattacaggtgtgagccaccgcgcccggctgcttcctgtttattctaaggtggctatttgatggatccagcaccacaggttgctggacccataggttgcaaagatctgccatgccctccttaacgggaccgcctttgtcatgtgccagtcatatacaccctcttgtgctggttccatgcctgggctctctgctgtcttcattagtctatttgtctgtccttgtattagaatctttttactgtctgttggtgattctaacacgcagtcggggttaagaaccatcaatccagaaccttgaagttcatggtaacaagtctgggtgttagtctaaatgcaattatgtagaaacccaataaaaagtttgtagaggaaaaatagattaactttgtggcatgggaagagaaacggcagaaccgtggggaaggcatctgtggagtggctgaggaaaccaggtaacaggcctgaagctgaaatctcagagcaatccagccggctgttcactgtctctcttctccccgctccagacctccagaccctcccacaccaaagtacaaacaaggaatgacaaacacaggaaggaaacgtcgctgtttaagtcatcagccaaatttaaggaaatctgatccctcctgcaaccacgttttattccctggttaccctggcatttcctataattaatggctaggttttaattaaacattgattagccactaattagtctaatgattagtcttggggaggagacatggctgtcaacaccgcaaaggaggaaggggagatggtgaaagattatggcttaggtagaaatgctatttctaccttcctccaagccaaatgttttctatgatttgggtccattataaatgatgctttcaatgtgaattttcctaatcggtttgagtctgatgaagtcccaggtgactgatgccaggaagaatgaatctattcgccttttcatcagatttcagactcttaatgcagccaaagagcttcttcccacttagagaagaattcgtttctgtctccacaatgaagtcatcctgggctgaggctgttctcctcccaagtcctttatagggggtctgaccttgccaaggacttctgagatgcaaacatcacagggtgtttcccccagagaagattctgcagacaccttgtgcccccacatacctgttcctcattctttgccacttcgcccagacctcccaaaatattgacacagctctagtttcatctgcagacagaatactacttgtgtgtaacttgctgtcaatcaaggatgtatttggcccccctgaccctcagccaacaaggaaagttgagttgctgtgcatggacacagttcatattaaattgcattggaagttatcctactagaagttaataacgcagtaaatcttggggcgggggtggggtgatgtgataacattggccaatcaatcccccaaggatcttttgtaagtttgaatttacgtagaacaatacaaaattcccttgaagcccaatcttcgtgttgagtataaagcttgggagagaactgaggcgtgaaacttgaaatccagaaaggaccagggaagagggaaagacgctgactaccaaggaaggcaggtcccgacgagcaggcctcgccagccccaaaaagcctccgtgtttgtctttggggttcctgcactactggaaacacctctgctcgggtgggagaagggatgggaaagacacagaacagttgggaatactctgctttttttaagtgtggtaaaacacaacgttaaatttaccattcttacctttttttttttttgagatggagcctcactctgttgcccaggctagagtgcagtggcgcaatctcagctcactgcaacctccactttccagattcaagcaattctcctgcctcaacctcccgagtagctgggattacaggcacgtgccaccatgcctggctaatttttgtattttttttttttttgagatggagtctcgctctgtcgcccaggctggagtgcagtggtgttatctcagctcactgcaggctccgccccccggggttcacgccattctcctgcctcaggctcccgagtagctgggactacaggcgcccaccacctcacctggctaattttttgtatttttagtagagatggggtttcactatgttggccaggctggtctcgaactcctgacctcaggtgatccacccgcctcggcctctcaaagtgctgggattataggcgtgagccaccgcgcccggcctactctcaccatttgtaagtgcacggttcagtggcattacctggccattgttgtatagccaccacctgtccatagaactcttccatcttcccaaactacaattctgtccccattagatgacacctcttactccctcctccccccggtccctggagaccactgttctcctctgtccacaaggagggaccttctataagtggaatcacacaggatttgtccttttgtgactggcttatttcacttagcataatgtcctcagggttcatccacgttagagcacgtgtcagaatttccttccatttttaaggctgaattctattattttctggaaagatcatagtttgtttaaccattcatctgtctatggacactggggttgcttccatctttcggctgggaaatcctgacactccttgatccggcattcagattcagatatttgagtcttcaggtgaacaaacaggttagacagggccctatgcaagccccacacccgcccacaaatctctgtttcactctcttcaaatcggcaaaggagaagcaagatttgtcctgagctctcgagactctatcagaatttttatgtcccttttacatcccctttttatctctcttacttgtcattttccaatagcttttgccagaagagcacacgggacacattctacacaaacttttatcatttcaccgagatggggccagagctgcacgaaatctccttacctgggaggggcctggagaggagcggagcagagaggaggggcctggagaggagcggagcagagaggaggggcctggaaaccgacgccggggtctgagctgcggctttgccagtgacttgggcaagacccctggcctctctttgcccaagtataagtggggccttgtgcctctggctctgacaggctttgggatgtgttatctgaggactctgcacagttgcatgggcataaaaagcggctgctccacagccccacgggatccgcgccaagtgtgtgcacgaggccaacagtggctcacgtgaagcctctggctgccagccccagacttcagaaatggtaggaaaagggcctggcgcggtggctcatgcctataatcccagcactttggaaggccaagacgagtagatcacctgaggtcaggagttcgagaccagcctggccaacatggcaaaaccctgtctctactaaaaaaaataaaaaaataaataaataataataataataaataaaaatcagccaggtgtggtggtacacagctttaatcccagctactcaggaggctgaggcaggagaatcacttgaatccaggaggcagaggttgcagtgagctgagattgtgccactacactccagcctgggtgacggagcaagactccatctcaaaaaaaaaaagaaaaagaaaaaatgaatggtagtaaaaggaagctttctccaggacaagggactggagggtcagcagtgcagggggccattgctgctgctttatccaaattacatccccgggagctctcatcactgtagactcagagtaactaccaaaggctgaacaggtaacaggtgcctggccgcgagaggctctttactgatgacagcgtgttaatctccacaggaggtgtatcgtgtccatttaaaggccaggaaattcggggcacagagctagcaggtcatgtgcacaaagccacatagttggtcccaaacccctgtgacagggacaacaagctggccccaacagacatggggctccctggcccccaaggtgggtaaccagggggaactgcactccccacccatattagtccgttttcatgctgctgataaagacatagccaaggctgggtactttataaagaaaaataagtttaatagactcaaagttccacgtagctagggaggcatcacaatcatggtggagggtcacaaacacgttttacatggtggcagaaaagagagaatgaggctgggtgtggtggctcatgcctgtaatcccagcactttgggaggctgagatgggtaaatcacctgaggttgggagttcgagaccagcctggtcaacatggtgaaagcccgtctctactaaaaatacaaaaaattagccggtgtggtggcagacacctataatcccagctactccggaggctgaggcgggagaatcgcttgaaaccaggaggcagaggttgcagtgagatcatgccattgcactccagcctgggcaacaagagcaaaactccatctcaaaaaaaaaaaaaaagagagagagagagagaatgagagccaagcaaaagaggtttcccctcataaaaccatcgcatctcatcagacttactctctaccatgagaacagtatgggggaaccacccccatgattcaattatctcccaccagtttcctcccacaacacatgggaattatgggagctataattcaagatgagatttgggtggggacacagccaaaccatatcacactccacccccactgcatgaggacggaactacgtgtctggttctagccaaaggagtggaattgaaaaagtgtggtgtctcttccaggatgagggtccacatccccatcttggagaggacactgtcacagaaggaggagcggctgagcctgtcttgtgaaggacactgtgagaagagagcaagcgtgcatgtggtgtgctatgttgcaggaggtggggactgcttgtcacagcagttaacaggactgactgatacacctcctgcccaaaccccagggtgacctctggcctggtgaattgggtcaaggcaaccgtttcggagggaggcctcatggtgtgggccattcccatgcctgctcctcacagacgactctaacatgggacgcagccacacactctcactgctggagaacggctccgctcagcctccctgggtcggtgtggcaagcctctgtggagagcagatatgtgccaggagctcgtggtacagagaggaataaaacagcctttggcctcaggatgctgatgagataaacgaagacagatgggccatgggtgggaagacaaggcccccggacacttggcccaaccagaagctcaggaaatgcttcttgggcaaggggagtcctcagcttggtcttaaaagatatgcaccatgggccaggggcagagaagaagagagggcagtccaggcagagggcacggcacgaacaaggcacagaggcggatggaggcacactcagggccagcactcgggggcgttgcagaatcagacctggcccacagacctggaacctgccagctgtgcctggcagcatagagatagtcctgggcaaccaggagcactggcagctggttacaacaggggagaggcatgagcgggttcccatgctaaacacgccagcctagtgcagtgcagggcatgatgtgggggacaaggctggaggccaggagaccatggagagatggcccctacggtcctgccagtgcccctgcttctgaaaggcatgcagcaggcacagaccagcagtgggtacccgaaggaaaggagacagagagatcaggtcagatttgagacagcttcaaaacatcaacacagcagtgttctcgtaaatggtcacctgccacctgggacagaaatagagggaatttcaaaatccatctttctctcaaaaaaaaagaccccttgatgaggccacaagggacacttgcccgttattcctacttagcaagaaagaaaaggcagcagctgtcatgcttagagagggacaactgtaaggtctctgaattctctcctggcagcctgagaagaaaggagcacctgagcagggaggaacagcctcagcagcaaggagcacctgagtgggaggaacatctaagcagggggaacacctgagagggtggatcagcctgattgggaagagcacctaaacaggaaggagcacctgagcagggagggacacctgagtgggaggagcacctgagtgagaggagcagcagtgagccccagccaactgcagctgtgctgtccaacgcacacacgccagcctggggactcgctcccctccacctcctcccctctgatcccaaacactctttctgctgacttggcaaatgccccgagacagattctcccttccccccaccaagctgctcttgctcctgctgtgtcactgagccagctgctgccattttgagggcatgccatcatccggccagcccacaggccactggtcctccttcagcccaggcccccacgcctcaggaagctcatttccagatgtgcgggatgacggcaccctggcttacctgggctcagcacgggggcactttccaggcagacagcatattggagacggcttcttcccacctggaggggaccccaggaaagctggtcctcattcttgacggaccttgcaggatgagggtggatcaggtctcagaatcccggttggatgggcctaaggagggaatggggaaactgaagacacgctgcctggttggatgcatgtgcgcttctcaggaccccgggctgctggcgggtccctgggagtctgagatggagctgggtcctgcttaaccatcagggagcacaagatcaccccactcgtgctttcctttaattgttgcaatgaatgcttatgacctgcccacctgccctccaggcaggttgacagatgaagaaatcaatggacaggcccaggctccagggaaaagcttctggccactggcaaggctacgaaacagcgccaagttccaggagcccaggaatggaaggataacctttagttagaggcacacagaaggcttcctggaggaggtgacatttgaatagggttctgagggatgtgcaggatttcaaacggaggaaagaaccaggcccatgtcccacacagaggtcctgggccaacgctgcccagggtgaagaagatcaaacggtgacaagatgcacgtggggacggggaagccatgtagggacgctgccagccagaagttcactcagttattcaacaaacatttattggctgcgaggactgagctggaggcactgaggctacaaactgtgtgactcagtgcagcagcaaggctgagtggtgaggagggtccagggcaccaggggactgaagacagaagccagacgtccaggagccttccagcaggcagctgccggagaccctggacaagaggtgagatggggccagcctgtgccttcagaggaagacagtggcagctacttgctcatctggtgggtccccaggagggaattcaaacattgtccccatcctcacgacaagtacactcagggtgaccagagaaacttgggtcacagtggccagtgggctcctggggagaagctgtggggactgcaggtgacttctctgcccatatgaattattgacacacccagccaggtccactgtgttcctacaacctgtgctgtggctgccccttgctcatcactgtcctgagtttcgggtgctgcctccagccacaggggtgagttttcctatgagctggcaaggcctgcccatgtgctggtcgtcctggccgggggttcaggctccaccctcccacttccctctgcattcactggcccagctgctggagtagtgactgctgtgcacctctcatcagatgcagattgggggaaatcaatggggttaggtcaccaagggggagacagggttggtggcaaagccccttgttgcaggtcctgcccagtaggagccccagggaaagcaggctcctcctggctgccgtgcatttgaaggataaggaggcagctgtcccttccagaatgcacttagggatctcagtctcttcatggggggaggaaaggccactctcagctgcaatctgaggttcaacacagcctcaaaatgaagcagcctccttcacctgcagggtgaaggtggcagttggcgcctgccaccgccagccatctctgcaagttgaaaatccctgggaggttcctgagacacaaatcaatggtgatgaagactaaaactggagctgtgaacccagagaggaccgggcagctgaggagtcatccagggcagcccagccaggcacgtgtctggccccagctgcccagcacccggcctgccaaagactcacacccaccccagcccagcaggagccacttcagtccctgaaactccagaagacacacgtgcgcacgcgcacacacgctcatcccattattatcttgctgcaccggctgaaatttattagcagcagaagcgtcaaggccctttcccagagctttcatgcttttctacaaagtaatcttccacgggtgcttctgtattccttccctgtgcggtagagcaacatctcagccgccagaccctctgaatgctaatttatttcaggagtcggagcagttggctccaggaggtcctcctggcagggaagggagggaataaaaggtatttctctctccaactctccaactgcaggctccagctgcccccacggtgtttacctcccttctcaccccaccgggagggagcagagcagggtgtccatgggggctgcaggggggttggtgggggacagtagcccagcccacacccacagctccctcctccatccaggctcagagccatgttcccaatgtgaggcccctcgggaatgaagcagacacaaatggccatgctttctgggcgagacagctgcgccagcctcattgggggcctggaaattgcttctgtctcagtggcatccggagagccatttcagaggatgctgacaggccacatgcatcctccatggaggggagaggcacggtcctgagtcatggaggagcacagacagactgacactgcataggtctggggactatggaatcgagtcagaggcaggtcagcccccagagccgctgctccaccactcaaaggctccacacatctcccctggcaagtggagatacccaatgggccagcctcaggcccctcccagcaccaggccctgctgggtcgtgggtccacggtgcccctggtgggagacacgcagagcacacaaacgaaacaagtaatgatgtcattgtaggtgcctgtgtgggctctgcagagaagagaagtcacttctggtggaagtaactggccaccgcagggctgctgggcatctttaggttgtcgggaggcctaagcagaggacactggagttgagacctaaatgacagggaggcacagccaccagcatttgtgagtgaagcagagcccccaggagactgtgtgtgtgcacctgcatgcacgcatacacaggcctagatgcccacatgcttatgcaaatgcacagacacacatggatgcacacatacacctacatgcagtgcatgcgtagatgctcacatagacacacagacacacatggatgcacatgtacctatacacatgcaaatacatagagataggtgtatcagcacatatacaggtacacatatatctacaagtacgtagatagaaactcacacatatacgtacttgcacacatacacacatatgcacataaacacatacacacattgatagatgaatgcatatgcatgtacacaggcacacacatagatggacacatacacataaatgtacataggtgcatatgtgtttatacaaacatgaacacacatgtatatctctacacatagatatatgcatacttttacatatacacacatgcatgcacatacatatacatgtacacatgcatatacacacccacaaatgcatgtataggtgcaaatacacatgcgtgcatattacatgtagatacaattgcatatatacgtattcatacatgtgcgtgtcacacatacatgtaccatacacaggcacacatatgaagggacttttctacagcgatttgatgtcgcaccacaaccgaggagctagttaagccatctctgtgaggagcttgaagtccacaagggagactgtgggaaagggacagtgatgtcaggtggagtgtgggaggtgggcgagagtgaggaacccaggtacaggctggagcccacaaggatgggctggggccatggctgtccttgctgcctctgagcatggtggtgtgggcatcctgcagaagccaggccctcgctcacagagccaaacacccacatctggcttgggagcaggctgtgctggaggaggatcagggttggaggaggatcagggttggagcagctgcagcgcagccactgtctctgctgtttgggggccaagctgtgcggcagggccagcacttaggaggtttcaccctttacccagcaccaggtggaaaggatggggggatacagaccacaattgctgcagggaaacagtaagaagggcttgggctctggaaatgtttgagaggaagagcaaacaggacctgtaggtgggatagggtggggttggaagagagaaaccccatgtagctctgtagctctggcccagcacactgggtggctggtatttccactcagtcccccaagaggagaggtttggacagaaaagatctgagaaggataggaagggggaagagaaattaggcttcaccttgcccccaaaatgtcccagctcccaggtattcctggggtgctaccaaaagaccaacctttcagtgaggccaagagacagagaagccatggggctgtctgggcctgattccagtcctcccccaatccacaccttggagccctcatggagctcacggtcaaaccagactctactgccagccaagtggtagtgggctcttctcgcagtcctggggaaaacacacaggagggattagtggcatctgtaactgggacttctccactgttctacagagagaagttggaaaatgcttctagaggaagcacagggagtgattgtggttggtgggaataggttggggaagacaacaggtagaatggctggtgcccaatctgacagcagcatcagcagatttgcacgagctacagatgttggaattactttaaaaatgcatagacttgaaaaagaacatataaataaaaatttcagaactgaaaaatgtactgactgaaatagaggactccgtggataagttttaaagcaattagacataactgaagagagaattagtacactggaaagtaggtctgcagaaaacatgcagagtgaaacctggagaatccaaagggcagaaaagaaggaaaaaaacaacaaaacagaagaagaacaggagacccacagacacagtgagaagggctggcatgaagctgaattccaggagggagagagcccataggcaaaagcaaaattgaagaagcaaccactgagaatttcctataacttatgaaaaacatcaagccatgttttcaagaaaccaaacaaaccccaagaaggacaaaccaaaagaaacccacacccagacacaagatagcaaaactgaagaagagagaccatgccatccacccaccatcattcaagtggctgaggcaagacctgaacccaaaaataaaaggtagtttcatcagaagaatagtgggaagctcctaaaaatcaaggagaaagctgggggaacagattcagagagggatagcaacgaggtgaccccaggagactctagtgatgaccttggccttatctaatccccccaggtataagagaagggtccctgacaggggggcatgcagcagggcccctctggcttctataggggaagggcaggtgtctgcctccctgtcccttgtacaccacgctttccaagactccccagcagtggagcatgggcctctagtgatgcagaatttttggttttactcaattgctacctcagagcccagggcaccccaagacagggcttggtcatgtgggttcaagtggaacctcatgcagtccccagaagcactgatccagccacactcaagcactgttgtggctctaaccagcatcccacgtcccctacttgctaagaatgttatttcaggggtcccactgcccttcttgcaagctgccttccagccccctccaagctcagctcatcaatatgtcaacatctgaaccccactagggagacgtttcccctggggttcccaggctgcacagaagtcaaaggatgggcccggcctcctggcagaaggattccacagcagacagtgtggctccctcatccacaagcttggccacagaggcgtggccagtgcctcttgggtcagctttgacccagccatgacatctcaccccatgagacttagggctgcaggaggaatttgagaccctagtacaagccaaacctgactcttctgggctcatggactggacaggcctcaggcagaacgtcccctggacaccagtgggcagggctggggcagcagtgacttacactggattcaggtcctcaaactcacagcataggggcaagaacacatctcttctgtggctccacccacgtcgctgtctttggcacctgcttccctgagcagcagacactgtgcctgcctgtcctgtcccctcacccttgcaatgccttctgaatgccagcacctgtgcttctttgtctgagggctttctctggcttttcgagccactttgtccccatcctccccaccttgcatcccaggcagcaggctggaagcaccagggtgttcacatcccaagggagcagccctcagaggctggtagggctggtgtgggaactcccagctcctttgcctcctgatgggataaccccaagacataagccacactccggcggctgtccggataatcctcctggataggctgccctccccggcccgtcccatgcccctctcccccactaacaggttttgcgtcccccgacaaattacttgcaccctatccttatctcgggtcttctggggaaaccctatccaagcacccactgccggctgctgatgggacaagctgggaattggagtgaacatcagaccttgagcaggccagcctcgggggtggatggtgcaagaaggcaccacctcctgcaaatgcagctaaatcagccagggctgaggtcttcaggcagtggtggacacctgagggtccaggggagtcaaagcaaagcccttggggtcagcagcaagcagaagccactgagaaaagagaagcagtggagcaaacccaacagctcccaggaagatccacagagggccaacgggcacgtggaggtgctcagagccctcagtcatcaggagaatgcagagcaaagccacaatgagataccactgcatacccactagcatggctatgattaaaaactagaaagtaagtgctgccgaggagacagagaaatcagaaccctcatcactgctggaggggatataaaatgttgcatctgctttggaaagtggtctggcaaatcctcaaaaagctaaacgtagagttaccatatgatccatcaatgccactcctagtatatacctaaaagaatcgaggctgggcgtggtggctcatgcctgtaatcccagcactttgggaggcctaggtgggtggatcacctgaggtcacgagttcaagattagcctggccaacatggtgaaatcccgtctctactcaaaatataaaaattagctggctgtgctggtgtgtgcctgtaatcccagccacctgggaggctgaggcaggcgaatcacttgaagctgggaggcggaggttgcagtgagctgagatggcaccactgcaccccagcctgggcaatagaaggagactctatccaaaaaaaaaaaaattgaactgacattcacacatcatctgtacacaaatgctcatagcagcattagtcacaatagccaaacagtgacagcaaatgtctatcaccaaacaaatgggtaaacacaatgaggtccatccatacaacagagtctcattcagccatggagcagaatgaagcactgatgcatgctacaatgtgggcgaacctgaaactttcacactaagtgaaagaatgcagcggacccaaaaggccacacgtcacatgattccactgtatgaaatgtccagataggcaaagccacagagaaaggagacgggtggctgccgggggatggagagagagaggagagggagtgactgcttaatgatgatggggtttccattcggggtgataagttttggaactagatagaggcgacggttaatgacatcgtgaattacagaaagccactgaattgttcacgttaaaatggttacatgttacatgatgtgaatgttgcctcataaaagaagtccatctgtatcaccaatttaaatacatcttcctggtagtgcctattaaaattatattgacttcgatctttttattatgaaaataaactgcactcgggtggaaaaagaaagcaaacttctgccacactggatcctcggagggagggggcagttgcaaacccagggcaggaggacggcacacaagccatgaacggcagccgtccgggggcatcaccacggcgcctcaccatcccttctctgtgtgattcctgttgttgccatccttctccctaagaaagcatctgccctgctacctggaggagggcagctgagagctgccacttgaaaatgcctacaaggactgaccgtatcagtccattctcacactactataaagaaatacctgagactgggtaatttataaagaaaaggggtttcattggctcacggttctgcaggttgtataggaagcatggctggggaggcctcaggaaacttacaatcgtgtcagaaggcaaagcgaaagagggcacgtcaacatggctggagcaggaggaagagagaggaggggacacgctacacacttttaaacaactaggtctcatgagaactcactcactgtcacgcaaacagcaagggggaaatacccacaacacatgacccgatcacctcccaccaggcccctcttccaacattggggattacaatttgacaggagatttgggtggggacacagatccaaaccatatcacagaccttatgagtggtaccggcaggtgtcttcagtgggacgccctagaaggagcccccaagctggggattcttgttcggtggaatttccaaggacagggttcccaggagtggagtgagggaggggacccatgtagggcaggggagaggctgaacaggcacggcctcagcaggaggccagcctcagcctgggcccacgagaaagctctgagagcaaatggcaccagcgcccttgccaccgtggggccagcccttacgcctcctatcacctggccaggcaccggtgggcagttccccacggagggctgccgtgggttggcagagctggggcagggccctcctgacccctctcctcctctcacccagtggccttgaaggccagagcacaatcccagggaggttggcaaaattccctccttcacctgaagccggcaccaagccagctctgtgggcctcccggcagcaccgctttgccgacctgcatgtgagtggctgttgccagcaccttccaggctgcccaaaagcctctggagtgcacctgtgacaattacaggtttcgtggcactaacagcaataataatcattagaaagcagcctgtgccggctgcatcggtttcttgtttagttgtgctttgagtgcagttaatcttatagctaatatctaaatggaaagggcagaaagactgtgttctttctatttcccctctaaatagatgttgccttcacccaggaacatggcttagcaagaggcatggcttacaggccttgccgtgccccaggaatggctgctctgaacagctcacaagggtcccgattccttactgccgcttcagcaaacgttcctgcggattttacgtggtgacgggtgccccctgcatgatagccgtccagaccccagcacccacagaaactaagccaccaaaacaagacctaacaggaggggacccgcagggctcctgagcagaaggctgggcgtcaggggagtcccagcagatgggcgcttgttcaagtcctcaggggcagacagaaggttccagagaggtcctccctgcggctgccgcctccccgggctgtgcagggctcacttgcagttaatgagccctcattaacatgttgatggggatgtgtgctgtgtctacttggaaccctttcactgtgatggttgtttttgttggattaatgatgctcaggttggatcccttcataaaagatgctgcttcccctccttcctcaaccccagccttttcctaacagagcaatgccattttcccaggcaggcctccctgcagcctcccaccctcggccagcccactgaccccaaatacttgcccggaccacgatccaagtgcgtccctgctggcttcccctccccatatggctccacaggccacttccaagttccaggtccctcctgctttcctctgagcaatgcattgatcctgcggctgcctctgggcccagcagctccttagcctggggatccaggaggcaggggctccggggaccgcttggctgggaccatgcagagcaagtccagggccaaggcacccaaggccaagttaaagcttggagcctggaatgactcagcgcgtgccccgggagctggcctctccagtgggcactcagggttctggtgaggagctaggggcacctgcagctacctctgaaggcgtgtttctttcccaggtgctgtggcaatttaggaacaagctcaggtgaaaggtcggtaataagggaagaggtctgtgccctggggtagggtgtctcctctgaaaccatcgcggacttccccagcctggctcgagtgccagtccacctccgtcacctccgtgtgacctggaatctctcctccatgtccttgaatcccctccacccactccttgaacccctccagcttgaaccctctccaccccctccctgagccccctccaccttgaacccctccatcttgaaccccctcacctccactttgaaccctgcacactcagtccacacctctcactgctgcccctttgcaggtctcatgcccttccccactcccctgagtcccctcaactgccacatctacttctaaagctccccagcctcttgatgcagtgtattagtcagcaactgcagagttaacactaggtaagaaaactcccgccatgtcactggggaaggtattcattcctatctagcgagcctgcaggcgggtccgagctctgctggttagagcgggctccacccaccactctgctgcagctgcgttccaggagagcttcctccagaccaggctgggcccaggcctgtccctcgtgtgttcattctgaagcccaggctgaaggagcagtggctgcctgaggcctgcttttctccaggcatctgtcactgggaactcaagaaccaagccagccacgtgagctctgtgtgcatcttgtccactgccatcccgctggtcaacagtcaggccctggagcccagtgtcagtagggaaggggatgtacactctgcctgcagtgggagaaagcccgggaatccttgctaggaatcgcaccagcttgaacccacttcccgggctgcactgccgggccccctgagcagccagaccccctcctgcctctgagtctcgaacatgctatggacctcccccggcacaggcccagcaatgtgctgcatatgctgggttgccgatgcctacagttctgtggcctctcgtggtcctgtttacctgcacaaccccttgcatgatccctgtcacatagtagatgctcagcacacactctgtaatctcctcgcgcacccagctttctatcactcagaagggccaggttcaccccagcatacccaccccaacccccacagctcaacaagggagtgcgcttcccccacaggttggggaagctttgatgtgctggccccatccaggcccaaggcagggacaaggggaccagctgttctctgccctgccctgccctgccctagcctctgcagagacacctccagctctgttgctatggttgccactctgttatcccctctgcttgctcactgatgccagacttttctagagtgggaactgacccacactctctaacagggcataaatcatcaaaactttaaagtcctggttaagacccagggacaggaagggccccgaaatcctgtgctggtgagaacgtggcttcacttctcccctgcagggccatctgggggttggcaggcatggcaggtccatcagaatcccaccctgccccaggcagggggctctgagagctgaaagcgggacgagcgctgggtgtggacacattaaagcagacaggtgagatgctgagggcgttactgacccaggttgagcatcaaagaaacatttgtcgaatgaattaatgaataatgacaaggcattgcttccattgcaccatgctgatgtaaccccagggtggccaccatcccagtttacccaggaccaaggggcaacctgggatgcaggactttcagtactcaagtcaggagagtcccaggcaaactaggacaaatgggtcaccctccatgaacaaggagatccttcagccccttcccggtgactctgcttggggtggagggagaggcagaggccagagcccagcggctcctccgcacccgctcgcctgggcccagaggggtgcaccagcctctgggggagtcctgccatggccacccacaagctgctcagaggggagacagcgggacccctggtggctgggaatgagactcagcatctccagggcaggtccaggagccgcctcatctcatccagtcgtggacacacccaggagttctgctggcagcaggaagcaggcgctggttggcttctgtttgccgatgtctgtcctgagagggaggtgggcttgtttctgggacagccgaaaagcagagaaccaggtttgcctccaaccctgtggcttccacctggccagcccctcaccgagtcattgtggctccttcagaaatcacagattggggtttcccaagcaccgccggctcagttggcaggactgactttggacaggagacacatgagaccctgactgaagctctgcagctgaggacccccacggcactcaacaggccccaggaatgcacagctcctgagaggggatgagaacattcctggggtttgcaaagctcagatctaaggctaaacgcagtgttctgcttcaagcaggaacccaggacatgtgagccagaaaggagtggggagagagaggaagggagggaggaagagaggggtcaggaggagagagacacagagagaaggagagagacacagagagaaagagggagagagggaaagagggagagagaaggagaaaggacctgctgaaacgtgaaaacagaaatccaaccagaaagaggagacagggttgaaggaggaaggaaagaggtagaaagctgaaagtgaggagaaggaaggaaactccgttctgccctcgtgcccagacaacaggtgctcattcagaaagcatggtggctctgggcccagagatgccctggggctgcccagatgccgcaggggtcagtcgcctcccggaggcagagctcagccagtgttgcctccaaccctcacctcctggcccaaggtgagccacacacatttctacacatggaaaggaactgtggaactggagagggtgagcccaaagacccatgcagaccactgaaggcccagacatagcagagacgccctgacgaagagcaccagggggtgagggcactgccctgccagcccctaagacactataaagacacactaaagacagcggcagtaggcagcactggactggcagagagacccatgggacagaacagagccagggcagccccatgcactgatgtgagcttggtcatgaccaagttcacgctgcaggcggcatcgcgggaaacggtgcttggagtcaggttatctatactctaaaataaaatgtgataccccccacaagtttaaaattttttcaaagaaatgatttatgatcttgtggtccataagaaggtcttttttaaaaatcacacaagccataaaagaaataattgagaaaatgtaactgcttaaattttttaaaaacctattcaaggccaggcggggtggctcacacttgcaatcccagtgctttgggaggctgaggcaggcggataatctgaggtcaggagttcgagaccagcctggccaacatgatgaaaccctgtctctactaaaaaagaaaaaaaaaattagctgggcgtggtggtgggcgcctgtaatcccagctacttgggaggctgaggcaggagaatcacttgcacccaggaggcggaggctgcagtgaatggagatcgtgccactgcactccagcctgggcgactgaacatgactccatctcaaaccaaaaaacaatacaaaacaactacaaaggctgggcacggtggctcatgcctgtaatcccagcactttgggaggccaaggcgggcagatcacgaggtcaggagatcgagatcatcctggcgaacacggtgaaaccccgtctctactaaaaatacaaaaaattagccgggcaaggtggcaggcgcctgtagtcccagctactcgggaggctgaggcaggagaatggcgtgaacccgagaggcggagcttgcagtgagccgagatcatgccactgcactccagcctgggcgacagagcaagactccatctcaaaaaacaacaagaacaacaacaacaaaaggctgggcacggtggctcacgcctgtaaactgacagagcaagactctgtctcaaaaaaaaaaaaaaaaaaaacacatacaaaacaaacagaaagtggaaaaacaagtcagaaacccagagatggttgcggcatgcataactgataaagtttgtattcagaatgcatttaggactcataaaaatcaatgttaaaaaacacacgagacaatcggaaaataaacaaaagaccaaaaaaaggcatttcatacaaggaagtgtctagccgatgaaaatgtggatccgtattcaacctcattagcacccagagatacagacattgaagccgcaatgagaaaccactgcataggcatccaatactcaaaccatctttaatggggtaaatggggtaatatctggtattggccaggatgtgggttcaggatccatcagacacgattggtggacttgtcaccgctgcagccacttaggaaaccgttcggcctcacctgacgaagctgaaaatgtgcttccctgagacccgacaactctccttcttggcaaatgttttagaagtcttgcccatgtgcaccaggagacgtggacattcacagcagtgatgctcaaactgattaaaatcacatcctccacctggagaaccgagggctgctgtgcattcagacgctggaattccacacagcactgaaaaagtgggccacagccacacatctgcacatttgcccatctcagaaacgacacagagtcaaaaaaaaaaaaaaaagcaagaagaattacacactggaattccatccaaataaagctcagaaatatacaactgaaccacatgtgatttagagtcagaaacagcagataaaactataaaagcaaagaatagaaaacaccacactcaggatgctgttcccatttggaggaagagggagaaggcagggaatgaaactgggaggcgggcaggacccagaaggccacgccagccatctgtgcctccggccggtggtggacacaggacacactttgcttattcattatttatacgtaaatgtctctgcatatttcatcatgctccaaaagaacgcaaatgaaggcaagaagctaacgcaacaggacagggggccgagggaggagaggccaggcaggctccagctagggaaggcttgttctcaacacccccccggtcagctgttgggggctgtgcccttccccccaccacaccctaccatcttctgatgctctgtcctcgtcccacagaagtgactggtctgggtctgacacccggcacgtgagcatccccaggatgtgaggggcaaagcatacctgtggtccccccacctgggggctcattaaaaacgcgtgtggactgcactgcgctgtgctgacccgggctggtccgggatgtgtggacgcagccgctggttggaaacgtccattgtgccgctggctggtggaggacgccgcatggctgagccaccccgaggggacctggcttccttcccccttccttgtccagtcgcctcttccttccctctggtcctcactccgacttaacccacagctttgggtgggctccctgctgccccagtgggcccagtgggcaaggaggggcgacccccaggatcctcagaaaagcaaaccctctctccacagtgcccctcgctgccccacatttccccaggtgtgtgggggccacacagtggcagccaggtctctttcagtgcctccctccgcctgccccaggagggacaccctagaaccccactcagcacccaccaatgcacaagccagagcagctaacctctgcccagagggaggaggatgcccttgggccaattcttcccccacttgcctctctgatggcctttccagggtctggggttgggggggatcctgagagcctggccgtcagtcccgcctggaggaatcactcagcctggagtgggctccacctccttccctgcccctccccaaggtgtgggactctgtgcctcaagctctgccttccagctgtctaggctgaacccccagatgacaccccagagcctccacagagccccgaggctgccccgggctatctgccaaggtccagccaggggagggatcccagctctcccactggttccagcccaggcccacgtggcctcctgatgtggctcccaaaccagccttcaaagccactcactgtgacggacacaggaggaatgccacctcctcatccaacgtgaggacaaaggatggagccaggccgtcagcagtgtgagtgtgtgaaactgctcggcccagagggttcagcttctgcttctcaggggacagaggcaccaacttttaccaaacactggaatagaaggaagctccgtctgtctgtccctgggttaacagctattgaatgatggacagagggtacatgtctacagagggtacagagggatttatcaatgtctctgttgactattgatgacaattggatttttaaaagcctagggcacagtgggtttcactctatagaaatcgcaccttaataaatctgagcgaaaaatcttaaggaaggacaaagggatggggacaatctgtccattcccctgtctccagatggcccagcccgtgaatgatctggtcatccattctaccggccatccctcctgtcccctcaggacagacccagcttttggctctgtttctacagagatcaatggcacctccccactgtccatggctcttcacagacaggcccaggagaccatgtgggccaggccccaacacaggcagacccagcgtgcagagcccacctcaccgaggcaggagaaggcggggaagacttcctggaggaggtgcattttggaggctacataggcgtccactaagtagaaagggatggagaggctggtgcaagctgaggagcctgggtaaggctgtggcatgaggcatagggagctggaggatgtggcctagacggggccaaaggggaccctggggaagagtcagggagagcctgtccaccttgctgaggaatctggattctatccactgggagcacgggggagctttgagcaggaagcaccaggactgactccgtgggtgggaaactgggcagagacagaggggggcacacagccaggggcaggggcccaacggggactaggaccgtagccctgtgagagaccacagtggtcagggccaaggatgggaagacgagaactgggggggcccctgaaagtggaggtgaggggtcaggatggtacccaggtgtgggcacaggagggcaggggcactccagaggcaggaatggaagagccacggagggactgagttctgtgcatgtcgattcccggcgctggcagggctgccgggggactcgtccagagagtacggggacatggacacaggcaccatcatcactccgtggtggacaaagcgacaggctggctaagcagagggacaggcagaggacagggtcctgggaagcaccctcggacgtgggcaagcagaggtcctaagccaagggtcctggccggggaggacagggaggtcaggaagccacaggggggtatccgaggacgccgagggctgtgaagacactgaacaaagcgagaccaaaggtggcagacagtggccagaccacgatgaccaggcacaaaggcttcagagcacggcaaggctgagagccggagtacaggatgtgcctaaaacccctcaccctaaatgcccctgaagacaaagcacaggtcatccacgctgcagggccccccaaggaaggcggctcccaggcctcaggctcagctacccagcctggagcaggaagccccttagcaggggagtgggctgtcaagcccattgcctcaagccagagggctccaaagtgtgcctggggaccaccgagggtccctgagagccctccaggggttctcaaggtcaaagttacatgcatttttaacactgagccaatttgccgctttcaccgagcggactctcgctgtcggcccaaacgcaatggcagaaggactgtgggctgacagggtcagggcctcagccaccgcactccttgccgcacgcatttgcagagggaaaagggagttgaacaaagtgagcctgtcactccagggaaaagaaatgatggtctttgttatcaatgataaaatctattctttttttttttttttttttttttgagacagagtctccatctgtcacccaggctggagtgcagtggcatgatctcaactcactgcaacctccgctccccaggttcaagcaattctcccacttcagcctcccaagtagctgggattacaggtgcccaccaccacacccagctaatttttgtattgttagtagagacagggtttcaccatgttggccaggctggtctcgaacccctgacctcaagtgatccgcccaccttggctgcccaaagtgctgggattacaagcatgagccaccacgccttgccaaaatctactctttcaaagagaaattagaatttggggaaatgttatccaccacagagagcttgacagcctcccaatagttccagactttgctgatgagaacagagatggttttaacaagtatgatttttgatactgcagagcaaaaattgttttgatatggtagtacatttttttccagaccactgaggcacaatgatacaagatcatatgtggctaaaagatccattcaaagtgcaagacagaccaggggattttaggataacagagcaaaaacattcattaatacgctttccgtttccatattgcaactaacccttgagaaaccggtacttgtgaagtgtcagtgcagtatcaaagaggaaaagccacctgggggagcagctacgagattccagctgtcttctatcaagccagaagttaaggagatttgcagaaatataaaaccatgccacttttttttttgctttggaaaaaatacatttcatcataaatatttatgccaacatgtaatgactatgatctttactgaattaaatatttttctttttttttttttagatggagtctcgttctatcgcccaggctggagtacagtgacacgatcttggtttactgcaacctctgcctcccggattcaagtgatactcctgcctcagcctcctgagcagctggaattacaggcacacaccaccatgacgggctaatttttgtatttttagtatagacggggtttcaccatgtcgcccaggctggtctcgaactcctcgccccaagcaattcaccctcctcggcctcccaaaatgctgggattatagatgtgagccaccacacctggcccgttcttttgcatcctttataataagctgagaaagcaccttcctgagttctgtgagctgttctaggaaattctcaaacccaggaaggaggctgtgggaaacccggtgtaaagccagtcagaagtgtaggtggccaaggccaggcacggtggctcacgcctgtaatcccagcactttgggaggccaaggcaggcggatcatgaggtcaggagatcaagaccatcctggctaacacagtgaaaccccatctctactaaaaaaaaaaaaaaaaaaaaatacaaaaaattagccgggcatggtggtgggcacctgtagtcccagctactcgggaggctgaggcaggagaatggcgtgaacccgggaggcggagctggcagtgagctgagatcgcgccaccgcactctagcctgggcgacagaatgagactccatctcaaaaaaaaaaaagaagtgtaggtggccaaaactcacaactggtgtctagagaaggggcagtcttggagcaaaagcttcagcctgtgcagtgtgacactacctccaggtagtggcgaagttgaattgaatcagagaacacccagctggtgttgagagtagggaggaagcccactctcctattaaaagagacacagctggccaggtgcggtggctcatgcctgcaatcccagcactttgggaggcttaggcgggcagatcacgaggtcaagagatcgagaccatcctggccaacatggtgaaaccccatctctactaaaagtacaaaaattagccaggtgtggtggtgcgtgcccgtagacccagctactcaggaggttgaggcaagagaatcacttgaacctgggaggtggaggttgcagtgagctgagatcgcatatggaactccagcctggtgacagagcaagcaagcctccgtctaaaaaaaaaaaaaaagacactgtgcatttggtgtcaggaggagaaaaacacctgggagcctctccccagctcccaggtgaaatcacgctgatggggttatgtcaaggtcatacttcgcttcttgggttcattctccaaagccggcatctgcagaccatgtggagctcacacttcccttcttgggttcattctccaaagccggcatctgccagatttccgctagtgtttcccacctcggtctgtgtccggtcaagtcctgtgcccctgaatctggtgaccctcagccctcctccccaaggaataaaccccccaaagcagacccaaaggtcccgccttgcgctgtccttgcaaggaagagagaaatggcagcaaaactagcccagatcctgttttcttcctcgctatgtgatgctgtgctgagtataaataaatatataaataaatgaataatttaggtttttctaaataagtaatgaaaaatggatgtgtgcgtcagtcataactgtttatggactagaactgcagttaatagttggttaagaataaaatgtgacaagaattaatggaaattttacattcacaattaaatttgagatctaattaaaaaaaaaaagccaccgctggatctgacatactcaggtcatacctgctgggtctccccaagacgccttcctccctcccacgaccccgacaaaggggctccttgtcctcctgttcaaagacattcatgtggcctctcatatcaatatcactacagaggaacagtcccctctctcagcaacagacccccacaaccctcgaaaacaatgggggagactgggggtcttaaccccagcaccacctccaccaccagaatctgtgcatggcctctgacctttgaatcttagcccccacgacctcctcctcccactgctctgcataagccagcatctcaggtacccccaaatctcacaggaaacctcacagagcacagagagccccggacaacactcactcctccctcagccactgtcctggaccccaccaagccgcaccggcagcccagtccatcatccctccccggtgccctgtgtcctatagtgtttggtgtcctgttttctggctggatctacgagccaggctgcctcacacacatcatggggtggatttggactgaggtggggccgctgggctgcatggagcctgcaaagctggactctggtgccgaagtttgccgacacctactctgctgtccagcctggagaccgaaagaagaggagctggcctggggcccaggagctggagttcccagtccagtgggatgacgaggaggatggggtggagggggagagcccgggcccacctggagagccctgctgtgctctgctgtagggcgtgtgagaggggccacagactcacacggactcacagggctttggacttcttagcaacctggagaggagggagagaaggagcagaaggaggggatgggaggcctcatggagttcctcaggccctagggccaccctcagaccaaggccacaccgtcctgcaatccagctggctgctctaaaggggctttgtgttcccaacacctaaccaggttcctcttcctccagctttgcttctgaggtctccaggccgtgagaccctcaaatttgaatcctccctgatcacccgcagccccacacatgcacataaacacacacatgtgcccacaaacatgaacacacaatgcaaatgcacacacacgtgcacatgcactcacatgcacacacgccatgcacacgcatgcacacatgcattcacactcacgtgcacacgcgtacacatgcatgcacgcatgcattcacacacatgcacacacacacacgtacacatgcacacacatgcacacacatgcacattcacactcacacatgcacactcacacgcacatgcacacactcgcatgcacacatgcacatgcgcctccaaggctggccctttcacgcagctttgcttgcccagcttccttcaggtccaggttcccaaagccctcccctgaccacaaagtttccaggccggccttgggtttggccccacaacggaggcagagccagacaccacctcagagatggctcagtctacctgctgctgtacgaccaggtcagaaaggcccaaagaggccacatgatgccgaggtcacctggcctgcctgagggagctgggtccaggctcagccctccaattcccggggtctcttcccagaccccaggaggcctggtgggcgggggttctaggggcctgaactgtgaatgtgggacacagagctgggccagggttccagagcacaggctgcaggaagggaccaggcaatcctggaaggaggaagagcccatagctgtccatcctgcttgtcttcatgcacgaagcaggtgtcagtcagctgggacaggccatctcgaactggcaaccaccccactcaaatacatgattttaagtgagccccactctgcaactctggccaacacagctatccgcatttgtttgcctagctcagaaggggaaaaaaaatatcaagaggcaggcgcttcaagtgcaaatgtatccaactcccagcaaaaggttgtgctgcgggcccacggccaggcagtattctgggattggacctcttcccttgccctaaatttaaccagctggaaatctttttttaagctgcatcctattcaaccttttgaaataaagatttgccttttaatgggaaatctgcattccattgtggagaaggaaccggcacccttggctcagcccggctcctcctggcacgcggcttcctggttttggctgcaaacctaggaaagctcacatgtgcaggggtggaggcccctgaccgtccaggccgctgtccctgggctgaggggacattctgagatgggcacagagactttcttagggaaagcaggaaattaaaagcaacagcaatgaaaagacactgtgccaagaaaataaataagacattcttcaatttttgcccacgaacgtgccccacgcatgggagctgcgtgcggcccgtggtcaggcagaaacacccgcacacaatggctgggttcaaatctcgccctacccctcctagctcgtgaaacatctctgtgtctcagtttccccatctgtaaatcaggggtgaggacaacacctacctcccgggggctgctacatagattgagttaatagtggtatagcacactggtaagagcacaggtggggccaaagaataaatgatagatgaaacgtgttctctcctggaaatggcttactaccgagtcatgcaggagggagagtcaggagtagggagaaacctttagtccaggttcgattctgcggcctcgggtgtgaggccggtgctatgcaggggctgtgggaacaaggacatggccttcaccagcgtggagagatgaggcagacgtggaggtggacccaaagtgggagatgtcagggcagacctggcagttggggatgtctttagggacaaaaggggacatgagccaaccccaagggaactaggcaggcagaaagggcagggacccatcctcctgcagacacactaggatatcagacgatgacggagcctgtgttctgggcgcctggtccagatggaggcgatgcaggttggtagaggccaggagaggaggtgggcactgtttcaggaccccatgtgtgtaaacaatttgattttcaaatgtatcacagaagtggtggctgggcctgtgcgaggtatgaggacccgatggagactctgaatgatggtggagaggaccagagaagaccgcccatcggctgagtcccagagcgactggggcatctgatcccttgtcccttgtacaggagagacagttgggcagcgtacaaaggaaggcaccctatggggacagctctgagggccccagccagccccagacactggagggggacataggaaactgggaggcagtccaggcacagggccctgtaagctgtgagttccaaggacaggactgcccagggtagaatcagagcatggccacctctgcacagcagatgctgtccgggagggcacaggggagcctgggcagggtgaggggtgcacatgtggaaaatgcgcccagccgtacctctgtggcacagctatctgagcacgtgtgcatgtgtgtgtgcgtgtgtgtgtacatgtgtgcatgtgtgcgtgtgtgtacatgtgtctgagtgcacatacgtgtgcatctgagtgcacgtgcatgtgtgcctgtgtctgaatgcacatgtatgcacatgtgctcaagaccagggagggcagatcctgcaggccagctgtaaagaaggaagggggagccctggactagagcagatctcaggaaccccaaatcagggactcattctcttcattataacctcgggagaagaattacagaaagttatgagaattgcaatcacttcctatgtgtgcccaaggtgtacgcacttgaccgtacatatgttacaccctgaggaaaatgttcattaggatagaatatttgcataattatatgtcaagctgtacactattttggtaggcagatagggggcttcatgagatgacctttcagagttctcgggtttcttaggggctatgagggggtggaataatggccccacagatggccacatcctcatctccagaactcaacccctgcttctgtgaaccctactctctgtgaattcattgccttgcatggcagcagtcacaggagtcagttaaagatctggagatgggagattatccgggtgggcgggtgcaatcccaacgtccttagaagtggaagacggaggcgggaggggtcaggatgatgtgatggatggagctcatggagggcacaagccaaggagtgccgcagcctcgagaagctgggaaagccaaggaagcagatttcctgccctttgagcctccacagaggaacacagccctgccgacaccttcattttagccaagtctaacctccagactgtaagatgacaaatttgtagctgggcacggtggctcatgcctgtaatctcagcactttgggagactgaggcaggaggatcacttgagcccaggaattcaagaccagcctgggcaatgaagtgagaacctgtctctataaaacatttttttaaataaagataataaatctgtgttattgtaagccacttaatgtgtagtaatttgttagggcagtaacaagtaactaacacagactgtgactctccgagcactgggagtctctctccaccctgccaccatccttcccaggagcttcctttcttctgtccaacctcaggacctgctccctcaacagacaggaactaaggtgcaccatcgggaggctgcacgccatgagtgtcttaagggacaacacaccagcagagacgcacgtgtgccgtggaggtggcagaggtactctgcggatgggaagatgcatagctactcagggcgtgcgtggccacacactgtggcaattcctacacccacaatgcaggcggctggcctgtgggctctcacaaatacacacacacacgcacaggtgtgcacgtgtgcaggtgccagctccttccacccagcccatccctgctgggagccagaacgtacacctggacacccaaggaagggggcgctgcacgtgtcctttccaccctggagtcaggtgccagcacctccccagattccctcagcccctccccagtcacagcttggagtgtgcaggccctgcttggagggccattcatccgcctggtttctgagaagagctttcgtgccgtgggcctgtgtgggcacctgcacccatgtggaccttctgaaaccgggaggctgtgccacgtctgtgggtagttcggtgcgcacacgctggatgggcacacgtgtgtgggcgcgtgcatgtgggcatacagtggcacatgcgcacgtgtgacaggggctaacaggtcctaggcctgaagccgcgtggaatctcggaatcctgaggcctcctttcaagcacttgtgtcatcccctactgaggtccctgagtcaccatgatagttggtgcctggcctccgagttgccagcccagcccagccctgctcccctggggggtgggaagttccctctggaagctcctgtcacagctgcacctgaaaggcccagctcccagcacaggccctgagggacagcagtgaggaccaaggccaaggaagctcccatttccatgacaacagcaggcagggatcataggagctgccagaatctgggagaggcacggaaagaccccccagagatcctcagagagaacgcggccccactggcaccttgacctcaggcttctgccctccacaaccctgagtgaccacattcccgttgcttccagccacccgtgtggggtcttttgttacagcagttgcaggaaattcacatgtggtttgggcccatcagccaagctcccgtacaaactggccccccagaaaccacatggatggggagggccccagatcatagccaggatgcaacccactcacaggggccacacgcccagccctgctgttgtccttggcaggatgccctgtcattctggttcaaaaatgtgtctgctccctgctggagctgtacaaacacttcctctccgagttcggaagatctttctgcatatccgattctcaagttcaaagaatgatggaaacaagaaacagccccaagcctgagatggcagagctggagccagccctcttccctggagagccggtggaggctgggctgcaggagcctgggcagaggcttgggccagcacggcggccccacccctgagggtgaagagcaaggcgggaggaagagggcaggagctgggctctgcatggtcactgcaggctgactctcacctgctttagcagggtcaaaaatatgagcaggtctttgggaatgagagctggccaggaatgggaaagctcctccaagagggaccagaggtgcctgggagcaggtttctagagtgtgtgtgctcgctcttgctctcgctctcctctctcctctctcctctctcctctctctctctctctctctctctctctctcgctctcgctctctcgctgtctctagctgtcttgctacctatctccctctgatacagaagggaagtgctgggaagggaaggcatggtccctttaaatgatacagaagggggttagggaaatgctgggtagaggggggcatgatccctcgctagggccccacccccacaggcctagggcaaggagtctaaatgttgcattttccaaaaccaccctggcccgccacgcccccatcccgggcctataaaaacccgagaccccagcgggcagacacacagaagctgctggagagcgggaggaacacatgggcagaagaagacaagtggccaagcggccgggacatggacaggacgtggaggggagcacgtcggcagcccgactccacggaaaaaccatctcccttctggctccgccatctgctgagagctacttctctactcaataaaactttgcactcattctccaagcccatgtgagatccgattcttccggtccaccaaggcaagaaaccctgggataaggaaatccctctgtccttgtgataaggaagggggtctaattgagctggttaacacaagccgcctacagacggctaaactaaaagagcacccataacacacacccatcggggcctcccgagctgtaacactcacccctagacatggccttggggtcagagccccacagcctgcccgtcttatgctcccccagaggtttgagcagctgggcactgaagaagcaagccacactccctgtcacacgccctgtgagggggacaagggaacttttcccgtttcacctctcccaccctttccttctccctgcaccccttccctctgcctccttatgtccccacaatcctccctgccatcatcagggtttcaaacagacagtccccttggcatggaaggaaccagcaatgacagtcatgtgactctaggcagcaccttcagctctagagacccaggtgcttccccctggccacggtgaagagggtggagataaggaaggtcccttctgaagtcagaacagaaaagtccccgaagttcctggtaaaacccccatcgaggcggtggctcaagcctgtaatcccagcacttggtgaggccgagccgggcggatcatgaggtcaggagttcgagatcagcctgaccaacatggtgaaaccccctctctactaaaaatacaaaacttagctgggcatggtggcgggcacctgtaatcccagctacccgggaggctgaagcaggagaatcacttgaacccgggaggtggaggttgcagtgagccgagatcacgccactgcactccagcctgggtgacagagcgagactgcgtctcaaacaaaaacaaaaacccaccacccaagtcgttttcctcaaaagtgtcagtttggggtttgtctatttacagatcctcagcatcacggaaaggatgggggcagccattcattaataactcatagaagccaggggaccaattagaacgggttttccatttcagggcacgccggaaaagccaccgggacctggagcagccactgcaggagcaggtgggggtgggtgaaatggtggtcagaaaaaaaatcccatagaggaggaaacatttcaagaaaagatattaaaatagaaagcaatgatccattgctaaacacttcacatttttcccaaagttccctgcaacttgcttctggaagagtaaatggaaaactttgggaacgtaattttaattgtctatttcacacccacgtgtcctgctccctccccgcccccacgcagaagctgggccgtctgcatcaagaccctcttcctccagctccagcggtggcagttgtggtggagtgaccggggacacagcaagcaggcggcagccccatgcacgcggggagctgtctggccttcgcagggtttttattgtattatttaacacccaagcctttcagcatgtgcctgccgcacagtttatgctcccagcagagggacaataactgaaggaatatttgcaaaaagctgagttaagtaaatattttatgcccattaatgtaatggctcaggaatgatgtgttggggcaggcgggcaggggagccagtgctgccaatgtgcagagggtgacaggggttcctgtgggcctcagccaagctctgctgactctcagcccacctttgaggccgcctagtcagagagggtggagggggtgtgtggcaggcctcctccaggagagagccacacaccccctccaccctctctgacttggcttggttccagcagagttgaactaagcacacctgaagccctgatgtctctacttaaaaagagaaaacttcccatgagcacacgcccttggctcagttaatgtgcttctcaaagtagggtgcccggggcatcagctggttagaacctcgaattctcaagccatgcccagacccacgggatgagacgctgtgggggtgagactcacgagctgtgttacatgagcgttcaggggattccgtatggtcgagcgcagactcactgtcctgggccaccagctgtccagctcccatgtccctgtccaagaaggcccttccacctttcctggtgaagccaccctgctgaccacacccacgggctgcgtccgtctcttaggttctaagtatttgacaaattacatgatgacccagctaggggggtcaactgttccccacgcagcatctacaaccagaggatggaggctgggatttacgttccagccctggacccaccccactggcaccccaaacctgcccactctcacttcagacctgcccaatgtcaccctggacctgcccactcttacctcagacccacccactctcatcctggacccgcccactctcacctcagacccgcccactctcacctcagacccgcccgctctcacctcagacctgcctgctctcacctcagacctgcccactctcacctcagacctgcccactctcacctcagacctgcccactctcacctcagacctgcctgctctcaatctggacccgcccactctcaacctggacccacccactgtcaccctggacccgcctactcttacctcagacccgcctgctctcaatctggacccgcccactctcaacctggacccaccgtcaccctggacccgcccactcttacctcagacccacccactctcaccctggacccgcccactctcacctcagacccgcccactctcacctcagacccacaccctcaccccaacccttggttcagttaacgtgcaaggtgagagtgtgactgtcatggtcaccacggacctgcccacattcatgctggatccacccattccaaccctgaacatgcccgttctcaccccagacctgtccactgtcaccatcaccctggacccacccacattcatgctggacctgcccactctcaccccagacccacccacactctcaccccaactggcccactgtcatggtcaccctggacctgcccactttcatgctggacccacctactcccaccctggacccgtccacattcacatggggcatcctgcctgcctggaggggactgagtcacttaggatgcacggaagctggggtgctggtagctgtcttgatctatttcacaggtttgggggacccaactgcaccccagcagagggcctggaacaggttccctcagcctcacagacaggcggcatccagtccagggactgtagccctgacaaggagccccacctgcccagggccccccagcaggcagcgtctcccggacttcctcccccaccgcaggccctgggatggggcatctgagggagggatctttctctaaagtcaggcagttcctgaaaacgataaggcagcgtctcccctcccacagtcaggctcagagtggaaggtctgcatttggggtctgccgcccggggacaacagggagccctggaaatgacacgccccgcccccacccttccctgatgccttgctctggaaggttcttcctcccagccagtctcctcctgaaaaaggagtgcgggcactctgccttgcttcaggaggcctagaaagaggggacagggcctggggagcgggggacaggatgagggggagggcagggtgggggagctggagggggtgttgggaagggctcagggagggacaggaggtggaggcaggggtggaggactgggtgctccagtctgaatgtgtgtgtcccctccaaagttcacctgcaaacagtctccagcaggattgtgttaagagctggggcgtttaggaggtgatgagggccagagggctcctccctcctgcctgtgcccggattaaggccacaccaaagaggcttcacacagcactggacaccttgtgtccttcacttcccgccaggggagcacagagcaagaggcaccatccgggagcagagagcagccctcaccagacacccagcctgccggcaccttgatcttggacttccaacctccagaactacaagaaaataaatgccttttctcataaattatccagtctcaggtatcttgttctatagcccaaaaggtctcagacatgaaggaggggaggggcacaggtaggagggtgggggagaggagggatgcaggtgggaggatggcagaggggaggggtgcaagtgggagggttggggaggggtgcaggtgagagggtggggaaggggaggggcacaggtaggagggtgggggaggagaggagcacaggtgggagggtggaggaggggaagggcacaggtgggagggtggaggaggggagggtcacaggtgggagggtgggggaggagaggagcacaggtgggagggtggaggggggcatatgtgggagggtgagggaggagaggagcacaggtgggagggtgggggaggagaggagcacaggtgggagggtggaggagggggagggcacaggtgggagggtgggggggcataggtgggagggtggaggaggggaagggcacaggtgggaaggtggaggaagggagggtgacaggtgggagggtggaggaggggaagggcacaggtgggagggtggcggaagggagggtcacaggtgggagggttggggaggagaggagcacaggtgggagggtggaggaggggaagggcacaggtgggagggtggcggaagggagggtcacaggtgggagggttggggaggagaggagcacaggtgggagggtggaggagggggagggcacaggtgggagggtggaggggggcataggtgggagggtggaggagggaaagggcacaggtgagagggagggcgaggggcacaggtaggaggggcatctgtaggatgcaggagcaggggcatctgtaaccccaggcctggcgccgtgaaacactggaggccaccaggtgcagggagatggtgctgggtcaaatgagcctctgcagaggatcaatggcggccagagccattagccaggaaaatgagacagaagcgaaggcctgacaggtgatcgataccgggtcacccagcgcagacaggaaagggtccagcggaggacaccaggggccagcgattgacatctcaccctgaggaggcggccgagctgtctgtcacacacacccccggccacaagcctcccccttcagggacctgccgtcactgacagcatggactcagtgtggcccgagaggactgcagggaccaccaaatacccgagtctcctggacactggggccccctgggggcgggtttccagaacagctggcaagcagggcaccccaaacaaaggagggcgtggtgcacgcacagggtgcatggggaccctgcaggcccgaggcaggggcaggtctaggaaggaagcggtgcacacaggcagaggaatccagggcactccacagccaggcgcaggctggccaccactgggacaagccaccccggccctacctcccacccagtttctctccacctaaaggtcaggggcctgggagaggcacgcgggggcctccagtccaatcccacccttgctgagtgataggtgtggctctccgacagcgggagaagcatccctctccacccaccccagcactggggtcaggagggaggagagagggtgctcccacccctccattcctgcaggttcttggccacatgtgccgatttcattttgctcgctggattgcaaaggccctcatgagcgactgagagctgccacttcgatttgcgaatctcgctgagaaaaacgtgacatgcacgtttccactgggcactggagaaagagccaggggacttgggcaagacaaaaataaaaccagtcagagtggtgaacacgggcaggacgtccacattgctcctctctcctctgcagaccctagtgggccagtggggccctggcctcctcctccttccctccccttcctcctccccctcctcctcccctcttcctcctcctccttctccccctacctcctcctcctcttcttcttcctccctctcatcctccccctcctcctcccctcttcctcctcctcccctcctctatcttcctcctccctctgctcctctccccctcttcctccacctccccttcctcccactcctcctccacccctccccctcttcttcctcctcctactcctcctctgcctcttcctcttcccccctcctcctccctctcctcctccttcctccccttcctccccctcccccttctcctccctctacctcttcctcctcccccctcctcccccccacctcctcctcgtaccccaggcagccccttcaggtctcagtcccgtcaagctcagacctgggacccacatagacccgggtcaggtgccagcccctctgcaagacccttgttgggcccctgggcctctcgggtccttgctgtcaaatgggagcactagttgtcatggtgacaactccagcagtgccctggggactggagcgcataccaggtggcccagcctaaatggatggctctgaaaagttctctgggcacaaggggtcccgggctcctcctgggagaacacgaggccctccctcctggccttccagactcaacggagcttctccaggctgcagggacaacaggcagaaacttctccgaagccaagagcctggggcagaagtgagcagcagccagtggcacctgcagagccggggcacccgcagggttcccaagagagcctggaagatctcagcaaaggcaggagcaggagagacgtcgagggcggatgaggagtggacacggtggtggtgagaggggtcaggaggaggaaggccaaggctgtccacagggatggggccagcatctttccatgcccacagcagccatgccagatgggaccccagccacaagcccgggaaggccagacgggaagccctacaacgggagggccaggatgtgcccgagggaggggctcagaggcaccccagggagaaagcagagtggctgggctctctgtgcctgtttctccacacacaaaaggggcgcaggtttgcagcgctgcaggagtggggggtaggaggtggcgtggagtcagcccaagaggcgtgagcctcgtaacaagcaagcagtgcagctgtggtggttgtttctgagaatgcgtggatcacaaaaaggaggcagatggtaaaagttaaaatgtaaaacaggtgtgcaaagccaggcatgggggcacagctacttgggaggaccacttgagcccaggagtttgaggccagccttggcaacgtagtgagaccctgtctccagtaattaaaataaaataaacaggtgttcaaatacgagcttgtgctcgcgcgttcacggcggcgcaattcgtggtggccaaagggtggaaacaactcaaatgtccatcaaggaagaaaggatcaataaaatgtggtcagcgcagacagtggaatatcacgcagctagacagaggagtgaagcctgactcatgtcaccacacggaagatgccagaaaacatttgcccgatgaaagaatccagatgcaaaaggtgcatattgtatgattccactgatacacaatgtccaggataggcagacccacagagacagagagcaaatgggtgggtgccggggatgcagactgaccactaatgggtatggggtttcctttggggtgatgggaatgttctggaactacataaaggtggttgtataaggccgttcttgcattgctataaacaaccacctgagactgggtgatttataaagaaaagaggtttcattggctcacagttctgtaggctatgcaggaagcatggctggggaggcctcaggaaacttacggtcatggcagcaggtgaagaggaaccaggcacatcccacatagctggagcaagagggcgagagggaggaggggctatgggagcgacacacctttaaacaaccaggtctcgtgagaactcactcactatcacgagaacagcaaggaggaaatcggcctccatgatccaatcacctcctccaggcccctcctccaaccctaggggttacagttcaacgtgagatttgagtggggacataaatccaaactgtaccagtggtggctgcacgatactgcatacgtgctaaaagccactgaattgttcactgtaaaatggttaattttatattatgagaatttcacctggataaaataaaattttaaaaataaagttaaaacaacagcaatggctgggcacggtggctcacacctgtaatcccagcactttgggaggctgaggcagatgtgtcacttgagctcaggagcttgagaccagcctgggcaacatggcaaaatcctgtctctacaaaaacatacaaaaattaggcgggtgtggtggcgcacctgtggtcccagctactggggaggctgaggtgggaggaacactgaggctggaaggttgaggctgtggtgagctgggatcgtgccgccgcactccagcctgggtgatgaagcaagaccctgtctcaaaaatagcaataataataacaataataataataacaataatggcagcgagcactccggaggcgctcactctgagctgaagagggttctgagggctttgacccagtgaattgctgcaggaccctatgaggtgggaacttctctgttgccttttcccagctgaaggaaccgaagctcagacacggtgagtgacttacccaaggtcacccagccactaagaggccaaggggacaagagaactgagtgtaaggaggaaatcaggaagagactgacaggaagtgagcaggggacagtgcgcagctgtcctcgtgatgggcccagccttgaaggcagcgttccggctcccagagctggcagcaggaagacattgctggagggagcaagaggtggggcgggcaggagggccacctgagccctgagccctgagccctcagcgggctccttggagagtgacctggaccttaacattgaccctggcaccccgcctgctgttccccatgacgccccacgcccccaccctgcgtctgctcctgtgacttgaggaaacggaccgacctcctttaaaggaggggttcctgagcctggggagcgtgacttccgagcctgtccgaaaacaccaaacgccaaagacaccgaagctgttccacagaagccgcagccgatcgaaagccattgctgcacgggattttctttggaattggtttttggttcaggtattttttggattagcatcatcaacactagaactcaacatgagaaatcctcctggcaccctcagacccccaggatccacccgcagcgccccacccctcgggggtctaaggacggggccacgggaggtgctccccacgccttagctagacgcaaggccctcccgcaggctcccgcaagcccatcagggctgggcgtttcccaccccttcccaccccacccatccaccttccgtccaagcaggagtgcagcctgcttgggctcagcgtcccctcttctgagaagcagcccggccccatcctgagcgcccctgggcccacaatccctcctcacgtgtgtggggctggccgttgatgtcgcctgggctgggggtgcacctgcagcgcaaacacgtgactaagcatcttcctgtcccgggccctatcagcgttgggccccaggcagcccctccaggggctacagtcacccacccacctacaaagcccctcatctgcagcggtggcttcattcccgggacgcgccccaggctctgctcagtcatggcccccagaccctcaggagcccccgaaacatgatgacctccagccacgtgccagctgccaggaggaggcttcaagaccccagatgagcacccggctggccatgccccagggacagaggacccagtgtgacagaatccggcctgggccacagccacccacacagtccatcccagttcagcccgaggtggacaagaaaagtcccaccagggactggagcagatggggcgggctccggacccctgcctggtccaccatctgtcttgccagtcggtccgtctacccaggcagcccctcctcccggcccaccatctgcccggccctgctaggccctcctcctggctcctccagggccctcaggaggagacagagctggagccagggcccagacctccactgccttgggcccgccccatctggcacctccagaagaagggggcggcaagagcttggccagggcaggggcactccagggcagccgaaggcccttgccagctgtctcatgatgagatgagcagagggagggggaggggaggaagggagaggctctgggaagacaagggcccctccgctcctcctcccttcttcctcccctgcccacgtggcctgggcgggagggacacgccgatgggaacatcccagctggtccaggcctctgctccccccagctcctcctccctggcgggcagctcttctgggctcctgaggtgctgcgcagccccttccctggccctgggacccccagtgcctgagatgaaagaggagttgcttccatggacggtcccagtgcaagctggggggcgctggcctcaggacaccaggcatccaagacatagggacaccagaagccccggctctgcctctgaggtccagcagccccaaagcccctgctcagaagccagcgatgggagggcagggcctgcctgtgggacccatcatgggcgcagcaatcgccaggccctgggcagacagcagcacagcctgtgagtccagggctggggtaagtcggcaagtgcacccccggaggtggaatgacaggagctcctgtggaggacgcaggcgacccccgcccctcactccactgtgaggcctgaggatgtacaggggcagctctccctggcttatgaaacgcccccaccctgctgcccctctgggtcctcctcaccctgtggcctgcagggtcaggagcatgactttggtgtcaggagagaggctggctcctgcctgtggcgggtgttgggggaggagtggggttcattataaattacgctcccctcgaacccggctgttaggtgagggcagggctgggattcaccctgctctctgcaggggagggtcagcccccaggtgctcctgggtgggtctccacggcaggccaaaagggcaggccctgggcatgtccaccccctgtctctggtcccacagccccctacttgccacctgccctgagcagcccccaggagagcacccgcagggaggatgctgaggtgctggagggcaggagtcccagctgaggctgtgaccccagctgtgctccccgttccctcttaggaccagcaaagacccaaggacaggcggccaatcagggcccggtgtttacccctcctcccccacccccatcacgggcctcccgcaggacccccaggaagagcagcttccattgaccaaggtcgggggacgccctcccgctgacactcactctccacggatcctggagcccacgagtcccctccccacctccactgcactgggccccccgcaggccctggtgggggtggccacggataaccacacaaacatgcattttccttgtaggagcaggcaggtgacaaccagtgtcctactttcctgcattaaaacacccaaatcaacaggacggagaaggcccggaagaggggacctgagggagccagccgggcgctcagcctgcttcgctgggatgcttgtcgaggtcgggacggcaccaccaaactcacctctgtgcgccctgcggggcccaggagactcggtcctccctgggctcccccaggcctggggtggacgttggaataaagtggggacaacacgatgagagaccccagccctggaggtgccctcggccaaagcccgagatcaaagctgggagattcgtggctggacagcaccacctggtggacacgttggagattaccaaagccgaacagtcaattcgttcttggttctgggattttcttaattgggtcttagctgggccttcctttctctttccccagtagcaggggctttgtgactatcagaaacacctgccaggcctgggcaatatggcgagacctcatctctacaaaaaaaaaaaaaaaaacacaaaaattagtgaggcgtggtggtcccagatactcaggacactgagatgggaggatcgcttgaacccgggaggtcgaagctgcagtgagtcgtgatcatgccactgcactccagtcagggtgacagagagagaccctgtctctaaagaaagaaaaggccgggagcagtagctcacgcctgtaatcctaatactttgggaggccgaggcgggaggattacctgaggtcgggagttcgagaccagcctgaccaacatggagaaaccccatctctactaaaaaatacaaaaattagccaggcatggtggcgcatgcctgtaatcccaggtactcgggaggctgaggcaggagaaccacttgaacctgggaggcagaagttgcagtgagccgagatcacaccattgcactccagcctgggcaacaagagtgaaactccgtctcaaaaaaaaaaaaaaagaaagaaagaaagaaaagagaagaagtccttgtcttctaataagatgttgttggtttcagagagcccaatccaggcacttcaaacaaggcagggaaatcaatggccctgaagaaagtttctcttcgacaagcccctccctccctgacactggcattctggcattcacccaccagcccctccgtccctgacgctggcaccctggcattcacccaccagcccctcccctccctaatgctggcaccctggcattcacccaccagcccctcccctccctgatgctggcaccctggcattcacccacaagcccctccgtccctgacgctggcaccctggcattcacccaccagcccctcccctccctgatgctggcaccctggcattcactcaccagcccctcccctccctgacactggcaccctggcattcacccaccagcccctccgtccctgacgctggcaccctggcattcacccaccagcccctcccctccctgatgctggcaccctggcattcacccaccagcccctcccctccctgatgctggcaccctggcattcacccaccagcccctcccctccctgacactggcaccctgacattcacccaccagcccctcccctccctgatgctggcaccctggcattcacccaccagcccctcccctccctgacgctggcaccctggcattcacccaccagcccctccgtccctgacactggcaccctggcattcacccaccagcccctcccctccctgatgctggcaccctggcattcacccaccagcccctccgtccctgacactggcaccctagcattcacccaccagcccctcccctccctgacactggcaccctggcattcacccactgtctggggcaactaccctttcctcccaccactgatgggacggcaccctggcaccctggcctaccagttttgaggggaaaaaaattagaaatctttggccaaagaggggacaaattgagcctaaaatcaagccttggtgtctcactttttaaatctacttttaccttttgtgtattggttgtgtgattttttgtgtactcattgtgtatgattgctgaatacacaatgaatacacaaaagctataaatagatttaaagagagaaagcaaaccaaaacccatcggtaatccactggaaaaacaagcctccaactctattcagaacattgtcaattaaaagaaaagaattaagaatttcccttttaaactatatttcaggataactcaataactctagtggacaacagcaagtatttttggtttttgtttgtttggtttcttttttttgagatggagtcttgctctattgcccaggctggagtgcaatggcacaacctcggctcactgcagcctctgtctcctgggttcaagtgattctcctgcctcagactcctgagtagctgggattacaggcgcccgcaaccaggccctgctaattttttgtatttttagtagagttggggtttcaccatgttggccaggctggtctcaaactcccgacctcaggtgatccacccacctcggcctctcaaagtgctgggattacaggtgtgagccaccacacccagcctgtttggttgttttatttaagagacagggtctcgctccatcgcccaggctgaagtgcagtggtgtaatcacagctcactgcagccttaacctcttgggctcaaaggatccttctgcctcagcccccgagtagctgagactacgggcgcgcaccaccacacctggctaatgttttatttttttgtagagatggggtcttgccatgttgcccaggctggattcaagctcctggcctctctcaccttggcccacaaaagctctgggattacaagcgtgagccaccgtgcccagccttttttgtcgttgttgtttttaacagaacaatttcagctactcattgtgaaggagatgagatcatgagagaaaccatgattttgccacctctcatgacataagtatttctcgcaagggtcatggatgagatcagtaatgacaaaactagggcatcacagggtggatccgggctatgaccacctggacccacggggcacacttagcatcacagggtgggcccaggctgtggccacctggacccacggggcacacttagcatctcagggtgggcccgggcgatggccacctggacccacggggcacacttagcatcagagggtgggtccgggcgatggccacctggacccacagggcacacttagcattacaggtgcttccatgtggctctcacagctctgcccacgaaggcttctggcaaagaaagatgagcctgaatctaagggcgtttctgcggcacagcttccatttgcaggagacacggggcgaggcgacaccacagagaggcaaacagcagcgcgataggccacacatttgcaggacagctgatctggtttctgcaacaaatcacaagtggtgggaggagcaatgggggtcgggggcggcgcctgatctagagtaagagaggttcaagaggcgccaccacaaaacttaaactttgggccttgttaggaacctgtgtgttccatctgatggacgtaagcaaacaatcaggggaatgtgattctggatggggcctgagcgggtgccaaggaatgactgttaatttgaacattgccctaagggaaccgcaagtgtgttccagagtttcccgtacttggcgccttgcaacctgaagttcataggaagaaaatttcagaacgtttttgctacaggatggaaagtgcttcagccacaggggaaaagcaaagagaaagacaacagcaatgcatgaaacaagtgtggcgattatcgataaagtatgtgtggtgatcactgatcacgtgtgtgagtttatttgaaaacttacattaaaaaattttgaggccagacacggtggctcacgcctgtaatcccagcactttgggaggccgaggtgagcagatcacctgagatcaggagttcaagatcagcctggccaacatggtaaaaccacatctctactaaaaataaaaataaatgcaaaataagccggatgtggtggcaggtgcctataatcccggctactcaggaggctgaagcaggagaattgcttgaacccggaaggcggaggttgcagtgaatcaagaccgtgccattgcactccagcctgggcaacaagagtgaaactgtgactcaaaaaaaaaaaaaattttttttttgaaaagagactaggcatggtggctcatgcctgtaatcccagcactttgggatatcaaggcaggaggattgcttgaggccaggagatcgagaccagcctgggcaacatggtgagaccctcgtctcttaaaaaaaaaaaaaaaatttgcctcccaagacacatgcctgtagtcccagctacttgggagacctaggagagaggattgcctgaggctgggaagttgaggctgcagtgagctatgatcaagccactgcactccagcctgggtgacagagcaagactctgtctcaaaaaataaacaaaaatgaagaaagacataacctttctcttacagacatgatcaggcatcatggaaatcttattgcagaagttgcttgcccttcacccctgagcctcacctctctgtttcaggggatccgagtttagggaaggaaagtcgagggggccattgcttctcccttgtggctgctgcgcccacagccatgggcccctcacgctggggctgggtgcctgagcagagtccctgtgcagcccccaccaagctccagcatcctggacacctcacgccagccctcctggactttgtgctggggatgaggtcaatatgacagcccccctgaggtctggtcgctcccacacaccctccacagtgggcagaatggtgccccccaaaaggcccacatcctaatcccgggactgtgaatgggtgacttttcatggcaaaagggacattgccagtgtgaccgagggtcctgcgatgggagactccccaggatcatgcaggtgaacccaatggcattacaagggcccctgtgagagagaggcgggggtcagagcagacgtggctcgaaagcagagggtgtggtgacgccccagcctgggactgaggcccagaacgcggtggccttcagaagccgggaaaggccaggagacggatctgcccccagcctccagaagaagccagccctgctgacaccctggctttagcccagcgcggccccatgggacttctgacccccagaactctaaaataataaattggcattgttttgatccttctgtggctgatatgtgtgatgagggggttttcacactcttgcgtgggacgtgaaacgtctttagaacagtggcacgttacctgtcttacatggggaaaaaagaggaaaaataaatacatttgcattgttttaaaccgctaagtttgtggtcacgtgtaacagcagaaacagcaaacggatgtgccctccgaggctcccctacatgcctgcgaagctcggggacgctggggagggtcaccttggccatctgggagcaggtggtacatcaggaccctccctccctcatcaccacccttcctcccccttcgccatcctcaatggcacgggagccaacccacagtgaagcggccggacaggcaggctgtgctaattctctgcaaggcagagctgttcctccagcctcagaatgcagccagcccctgcacggcagcctcaaggggacaggacccccgtgctctctcctctcctctttcccctggccccggccctgcctctctgctccctgccccccagccccactgccttgggcctcccttgagctcccaggacaggtcagcaaattgctatgtgtgcatattttctagggagagtccacaaccatggtcagagtccccgagtccaaaaagagacagagacatggcctcaagtggctccttgggccccaggttctgagctggaattggattccctgagccagctcttagtccacggtgacaggcatctgctgatgtagcctcctcttatcttccccagaaaccagattagacgcggccagcaaaaagaatattctcagctggcaaaacgctttcaccggccaccaaaggccccccgtccctccagcccatggagggcacggtgctctctcatccagatgggctccgggccctgtgccccacatcccgggagtgagcctaggccctgcgctgcgttcatcgtttgggagcgttgtggggtgtaggtttccacccacatccagacccttgagtcctcaggagcaaggactggcctctctggtttcccttcagcaggtgctgaatcaatgcccgggaaccgaggcgacccatgaggtgacagaggctgagctggagaaggctcacctgagacctgcacagattcaggcgttatcgccgccaaggcccagcaaaggaagcgaggctgccgtggacacaactcatggctcaaactggggcggcccgaatgttccttcgtggggctccggggctggtagaggggggtctatgctcttccccctgatcttttggcaggtcctggctcaccggggctcagccccaccctccaacgcaccaggtgtcacagggcacctgctcagtggagcctgttgctgtccagagactgaaggtggtgatgatgaggccaacaccgatggccttgggaccaacatcaaggtgttttcctacccaaggactgcaccagagggacacccctccccgccacacacacacacacacacacacacacacacatgagatcctgtcccctgatgggggaggtaagggggagcaggccctgcagtgacctgttggccatctcttatccacctgacgtggccaaaggtagccacgttatctcccatagcatgtcctctcctccgtatcaggacacagtagacatccaggtgcctataaaatagacgtttctggagatagcagacccttgcaggctctccggaaagactctgtgataacagccctggtgaacagagaagcccttagccacacggtgtccaggggccccaccacacctctggcctttggacaaagtcagcacaagccactcccaccccacccacctccttcgtgcattctgcagctgccactccctgcccaccagggcgaccagacgctggctggagccagggcaggggcgggcactcttcaccgtttccacaggaaatcccagaccctgtccccgcagcctggcactcagacagctgctcccactctccccctgcccatgggagctcagcctctggggcaagaggggaccctgtttacaccaacacacctaggaaaaaccttggggaaaattccaggcctgagtccccagtgtccccagagtccatggctggtggcagagggccaagaagatagtgacaacgaggatttataccccagcaatgaggggacagcaacaaggcagcttctctgcaggtccacacaggaaaggaaacccacagtgcggctccgtgcagcaggggctctgagtgacactcgcaaggccatggcaccaggcaggggacccccccaccggagggcatggctcagcagaagccgggagagggtgggtcctgggatcccagcccaaagcaggcagtcaggaactgagtgaccgcgggtaccctgggggtacagggcagagggaggagagtgtctccgaggcccccttgccatccctcaatgccaagtccagcaaaggtggttttctggcgccaactagcaggcactgacccccctcgtatccccaactcgtgacccagccacctttcccgggggctgagtggctctgaacaggggtagagccgtggggcagtgtggggctgacacccaggaggcggtgggggaggcgcccactcaggccctcgctgcccggggaaaaggctgctgcatgcaaagcacgctgacgccagagccttcggcagaggagggggaaattgtttatatctcaccctccttcttaccatgggcctcctgggggctgctggccctgggtgagcaggacggaccaggacccgagatgcctcagagggacacttcttgggcaggaggacagcacaggccatggagtcccaaggggagggggagggctgtcacactgggccccggtgggtcctctgcagcatgacagtctagcctgcccctggccatgctgagccatgtggctctcctctcccagaccctgtggtgacaggcaagggcacaggggtggcggggcagaggcactgttgaaaaacctgcccaagggcctgcccttggcatctcctggacccaccctcatcttccccgaggctgtccgagtgctttcccgggtggtctgtcctcagtgggaatgcggcaagcctcccccttgtgcctggtatagccctacctgctgggggaggggacactaatgatcacccccagctcataggcacagaagggaggcctggggcaggggtagcccagggtcgtggctgagccactgagaaaagctcagacccccaaccccctcagctcttcctcccccaggttcctaaccacggcccgacctccctggtccagtgaacgtcccactccgcattgcatgctcccctctgggttcctccaaggttctcagagtccaagcctggtgatcaccaacaaaaatctctgcaaacagcagattcctacacagatggccctgccttaggatggctccaccgacggcctctgactccacgatggtaagaatgcggccagaactcagcagcaacggcacttgagtcccacaccaccatgttcactttcagtacagtgttcgacaaattgcacaagaaaatcaacacttgattagaaaaatagctcgtgagccggggacaatggttcacgcctgtaatcccagaactttaggaggccaaagcaggaggatggcttgagcccaggagttcaagaccagccttggcaacatggcgagaccccatttctacaaaacaaaacgaaacttttttaaaattagccaggcgtggtggcacatacctgtagccccagcttcttgggatgctgaggcaggaggatcatttaagcccaggagtttgaagctgcagtgagctctaatcacaccactgcactccagcctgggtggcagagtgagagtccgtctcaaaaaaaaaagcagacctcatgtgagctgattttgtccacctagaggctaatgggagtgtcctgagcacacatctgaggtcggctgggctgagctggccgggcggttaggcacactaaatgcactttttttttttttttttttgtgatacagtctcactgtgtcgcccaggctggagtgcaatggcaccatctcggctcactgcaacctccgcttcctgggttcaagcgattctcatgcctcagcctcacgagtagctgggattacaggcacgcaccaccccgcccagctaatttttgtatttttagtagagacggggtttcaccatgttggccaggctggtctcaaactcctgagctcaagctatctgcctgcctcggcctcccaaggtgctgggatcccaggcgtgagccgcagtgcccggccggtaaatgcatttttgacaggatatgttccacttgcgacaggtttacagggaccccagcatgaatggaggagcctctgtgtgccatccggagcccagcagagcacagggcttgttaaactcctgctgctcacagagggcatcacccaaaatcacaaagaggaccggacagagccacagaaccccccactactgcccagtggcccccaagctgcaccagggcctgagcccccagagactacaactcaggccttgctgtgtggagaccccagaggcaggggctgcactgagcctgcacctctctgtccggccctgcctgtgccccgctctccaggggtgaaggcgcctccccattctggtgctcctcaaaatcagcctcaggaccttggagttcattgtcatgtcataggcagctggggccattgaacacttgagttgtttccacttttttttttttaagtcggattctccctcttgtcgcccagactggaatgcagtgacgtgatcttggctcactgcaacctccgcctcccgggttcaagcgattctcccgcctcagcctcccaagtagctgggactacatgtgcctgccatcatgcctggctaatttttgtatttttagtagagacagggtttcaccatattggtcaggctggtctcgaactcctggcctcaggtggtccacccgcctcagcctcccaaaatgctgggattacaggcgtgagccaccacgcccagcctgttgccacatttttgcttttgtgaataagctgctatgaacacctgtgtgcaagtatctctttgagaccctgcttccgattctcttgggcgtatacccaggagtggtacgcatgaacaaataaacaagggacacgccaggcaagcctgtaatcccaacattttgagaggctgaggcaggaggatccctcgaacctaggagtacaagaccagcctgagcaacacagggagaccttgtctctacaaatacattttaaaaattagctgggcgtggtggtgcacacctgtggtctcagctactcaggaggctgagatgggaggatggcttgagcccaggaggtcgaggctacacagtgagccgtgatctcaccactgtactccagcctgggtgacagagcgagatcctgtctcaaaaaataaatgtaaaaaaaacacaggacaggccgggcgtggtggctcacgcctgtaatcccagcgctttgggaggctgagacagtggatcacgaggtcaggagatcgagaccatcctggctaacacggtgaagccccatctctactaaaaatataaaacattagccaggcatggtggcaggcatccgtagtgccagctactcaggaggctgaggcaggagaatggcatgaacccaggaggtggagctggcagtgagccgagatcacgccactgcactccagcctgggcaagactccatctcaaaaaaaaaaaaaaaaacaggacacaggacggtcacagatgggcatagactcacacctggaaattctaggtgtgagcacacaggcttccagagaggaggaaggtgggtcgtcaagcatatgggtattttataggttgaagcgtggtcccccaaaatgatatgaccctgtcctaattcccagaatgtgtgaatatggccttttttggatggagggcctttgcagatggaattaagtgaaggatgaggagatgaggtcatcctggattattcaggcaggcccaacatccaagggctggtgtccttataggagtcatacagacagacacagagaaggcctcgtgaggatggtggctaagcaggagggatgcagccacaagccaaggacgcccaggacaccagaatgcatgactgctgcttgaagccactcagcatgtggtcattcattacatcagctaagccaggtctgcacacacctgcaaagcaggaactccggagcagaagccagacccaaagagggacagtttcccctctggccaggacctcaccccatcaacccagctgcccacgaggctgctgctcaaacatcccaggcctacagctgccagcctgtcctgggctcagccgagggaagagggagctgtgaacaactcagccctgggcccctgcagggagccaatgaccccctccctttctccctcatgcattcatcccttcattcattcattcattcattcattcatccatccattcatcactccttcagtaaacaggcctggcacctcccacgcgcctagatatgaatgcagtatcaatgtgtccctttcaggggcccacagtgggtgggtaagcacacccacaaattcataactccagaggggacaggaggcccaacagaagaatcacaagggaaagccacaagggcctcagctctgcctggggcaacagggagaagccccctagactggtgtctggaggcccatcctggactgacgcagaggctttcctgatgggcaaagaaggaggcctccctctggtttgtgaaggagatggtggcacagagagctggaggtgggatcctgggttttgtcctccaggcgatagacacaggaggggtgagaacaggctcacctttatcaaactttggtggaaaattgaaattgtgttccaggacaaggaccaagaaagtctgatgctggccatgttcaggctgtgctgctctgagatactggggcaggcgggcttggcaaggtggcccccatccttctctccccatgtccccctgctcctgctcctgctccatgtctccccactcccagctcctcagtggccaagtttggcgtccttcaagaagtggccgaaacctctaaaggaacttcaccccgcagggcaggccctgcccaaggatgtctccaccacccagagtccagttccggccctcgacaccccacccccatcccagagtctggaatgatgcagcccccagctcctggggtccccacgtggagcccctgctcccagcaaaccagcgagggaggcctggggggagggaggggctaagagggaggggagcgcctggccgtccccagagagtacagctaacccacagcacataatcctgttaaaaaattaatcctcatttagccgggaggcaaggcagccgctgagataaagcccctgagaagtaataaaaggcaacagcaattgataaagtggtgaggccgctcataaaaccctgctgcagtgaaggtcgggcaggccccaggaatcggagagtaaccactgccaggtgggggcggggggcattgcttacaagccccagcccctgcagaggacgacccccttgggcaacagagctgatgctgatggtggacagagggagaaaggagggaggctgcctttctcagctcctccctgctcggcctcactggacgaccgtggccctttgggaaggaatcaccatccttggtccttgtctctctcctaacatcatagccatgaaagatcacagccctcctggggcccagccggtcccagagtagagctggtgagcctgggcctgtctcctgtggctcctggtggcccccgctgtcccccacacacttgtcccagggataggaggatggagagcccaccccagcccccacaccagggactcacctggaatcctcccagacggcaagtgtggtcaccactgcaattggcatctgcctgctggggaggactcattgtcatgtcctcacggggacgttccactccagccaaattgcataaccaggccattcctccttcagggtccccaaaagccagtaatggtccccacaaaagggcactggactggaggcaggagagacccattgagacccaatattgtaccattagacatggtggaaaattaggggaggggactcgatgcctccgctactccaacactggcgacgacccacaggtgtaagtgcccagcttccaagcccacccccctcaccagggcatcgagggctccctggaagcaccagtctggggctgcaccctggccagagacggaagagagtgattcccattactgtatcactccaactgctgcctggagactaaggagaagcaaggagaccggtcagaaggcagttgcaatggtcctgaccatgctaacttcacccacgttctctttcatttatgcactgaagaatcatttattaaacacctactgtgtgccaggcatcagaccaggagctcgggatacagtgctgctcacagccttgtaggagagacacataaacaattgcaatagaattccttgtatcaggttattaatgagaacaggaagttagcggcaaagctgaccttgtggaggacaatgcctgccttatggccctcggccaccagctgagacaccagcaggcctgggcaggccagcccctggcccagaggctgggtccctagggcccgagccccctacatggctcatctgcatggggcaatctctacccgtgcaagcgtcaaatccacccggtcccaaggacaaggaggcctctgggatcaagtcctgctgggcacccagagccccctaagcaagaaaagcagtgaataaacactttcctatgtgtccataaggaggagccctctcccctacagacactggtttgcccataaccactgcacccacagtggccatcagccctacctctctaagctcacatccatctgccttaggtgaggagtcctcagcttcaaggacactggaatgacgactttacgaatgctttgccccccacccaggtaacaaggagcccacacacctcccagatcttgatctctaataacatctccaataaaacaagccagggctccttgagaaatgctggattctagggcagaggaaatatataagataagcctggagcatcttatagtgctcaaaacacatacatccacacatgcacacatgtacacacacttgcacacatgcacacacgtgcacacacccacttgcacacagaaacatacacacgcgcattcacacacatatatgcatacgcgcatgcatgcatgcacgcacatgcacaaacatacatgcatacacacacacacttgcacacagacacgcgcactcgtacacacacacatttgcacacactgcagggaaacgtgaaacagattaggagccatctgaaagactgcccagcagccaaaagtggaacaattggagctgcaaaatagagaaatacaggattaccactcaaagtataaaatagttatcagtccatactgacataaacgagtcactgaatgaataaataaatgggatggggggcaaacccccacacagaattccaagtagtctatgcagccactccattgtccagaagcgtgacccctcaccccgtgagcgtgagtggcatgcatggccttccttccaaagaacagggtatgaagggggtggagggcaggaaagacagcaacctccagggagacacccgtgactttcctcggctgcgtgacccaggccacgtcaccagtgataagccctgttgatagcgtgtgccttgatgtgacctggtgggaacgcctcctgtttggttgctttttgttttttgttttttgttttttttgagatggaatttcactcgctgcccaggctggagtgcaatggcgtgatctcgggtcactgcaatctccacctcctgggttcaagcgattctcctgcctcagactcccaaatagctgcatgccaccatgcccggctaatttttgtatttttagtagagacggggtttcaccatgttggccaggctgttctcgaactcctgacctcaggtgatccaccctccacagcctcccaaagtgctggaattacaggcgcgagtcactgcgcccggccaggcaggaacagctctttatctctgcaaacctcctccccaaaaaccataaccccagcctggcgataaggaaaacatcagataaatcctaattgagggacattctacaaaacacctgaccagccctcctcaaaactgtcaatgtcatcaaaaacaaggaacagctgagaaattgtcacagccaagaggagtctgaggagacccaaggaccgaataccatgcattcgttgtccaagaggttgaggctgcagcgagcagagattgtgccaccgcactccaggctggacaacagagcaagaccctgtttcaaataataataacttatcagttgggcatggtggctcatgcctgtaatcccagcactttaggaggctgagacgggtggatcacctgaggtcaggaattcaagaccaccctgggcaacatggcgaaaccccatctctactaaaaataaaaacaaattagccgggcgtggtggcgcacacctgtaatcccagctacttgggaggctgaggcaggagaatcacttgaaccctggaggcagacgttgcagtgagtggatattgcaccattgcactcaagcctgggcaacgagtgaaattctgtctcgaaaatataaataataataataataacttatcaatgctggctccttaattgtgtaaagtaccaccctaatagtcaacattaataacaggggaaactgggtgcaaggaacgtgggaactctatattgtcttcgcaatttttctgcaaacctaaaactgtcgtaaaataaaaagttctgtcaaaacagaaagtatgttagatatttgcatgcatttgtcctcttaatttatttactcatgcaacaaagatgcattaagcacctatgctgtgctggacactctcccaggctctggtgataccatgatgagctaatatggcaggcccctgcttcagagagcctgacctcaccgtctacctgaaggcttgcatgaagagtatggggaaatttcaggtgacagatataaaggacaaatgtttacccaaaaaatataatctaggcctggcacagtggctcacgcctagaatcccagcactttggaagacggaggagggtggatcatctgaggtcaggagttagagaccagcctagccaacatggtgaaaccccgcctctactaaaaatccaaaaattagccgggcgtggcggcacaagcctacagtcccagctacttgggaggctgaggcaggagaatcgcttgaaactgggaggcggaggttacagtgaactgcgatccagcctggggcctgggcaacaagagggaaactctgtctaaaaaaaaaatatatatatatatattccaaaagtataaattcagaagaatgtgcattgtggccagactccacatgctcagcatgaagtggatgggggaaatttcagctgacagatataaaggacaaatgtttatcaaaaaaaatatattccaaaagtatagattcaaaagaatatgcattgtagccaggctcacacctgtattcccagcactttgggaggccaaggtgggaggatcacttgagcccaggagttcaagaccagcctggacaatatagagagaccccgtctctgtttttcaataaataaataagaaagaaaaaaaaggaaaaaatatgcattgcaacatacataaggaaccaattaaaccataagagttaacgctgggctgcacacagtggctcatgtttgtaatcccagcactttgggaggccgaggtgggaggatcacttgagcccaggagttcaagaccggcctgggcaacataaggagaccctgtctctactgaaaatttaaaaattggccgggtgcggtggctcacacctgcaatcccagcactttgcaaggccaaaacgggaggatcaagaggtcaggagatcgagaccatcctggctaacacggtgaaaccccgtctctactgaaaacacacacaaaaaaattagctgggcatggtggcaggcgcctgtagtcccagctactctggaggctgaggcaggagaatggtgtgaacccgggaggctgagcttgcagtgagccgagatcgcaccactgcactccagcctgagcgacagagcaagactccgtctcaaaaaaaaaaaaaagaaaaaaagaaattaaccaggtgtggtggtgtgcgcctgtagtcccagctatgcgggaggctgaagtaggagaatcacttcagcccgggagatagaggctacagcaagccgtgatcatgccactccactccagcctaggcgacagagcgagaccctgtctcacacacacacacacacacaaaattcagtgctgaagaacccacttaatcagtggtcgaggataataaaagtcctcacatggggagttagagacaagaaatcatgacatggaaaatctcccagtttctctggcttgatactttaagatatctttacacgcctatgacactatcgaaaaggaataaaaagataaaacccaataaaggtagcacggggtggggcagaggggatatttacattaactcgtggctgctggtgctatcaactgcttcaacctttcctgtgttaaagaaaaaacatttggccgggagtcatggctcgcacctgtaatcccaacactgtgggaggctgaagtgggaggatcgcttgagtccaggagttcaagaccagcctgagcaacatagcaagaccccatctctattaaaaataataatcatatggccgggtgcggtggctcatgcctgtaatcctagcactttggaaggccgaggtgggtggatcatgaggtcaggagttcaagaccagcctggtcaagatggtgaaaccctgtctctactaaaaatacaagagttagccaggcgtggtgtcagtgagctgagatcatgccactgcactccagcctgggcaaaagagtgagactccgtctcaaaaaataataacaataataatttttaaaataaagaaaaaaagtattcatgactcttgttaaagacaggtaggaagaccttattccaggggggctaccacaatggggtttagctgtaggagagccagattgggctcagtctcactctaccaaggacgagtaggacatgcagtccaggagcaagtgtgccgggtgggtggaaaatgactaagaggagacattgaggagacgggatgcttactcggccaactcagcagaaatcttcctgaaagcaggccagggtaacaagatatcgagagtggaggatgaggaatctgatcaaatactgagggtgatcacataggatttccactaaactgactcagcaggactcttgctaaacccgaactaaagaagccgaggacagagcccaaggtcagcgccttgaaggcttagtggagtagagttaggtcgagaagagggtctgtcacctgatagccatctgatcataacagccaagtagcttttccatcctttgtccaataacctttctctaagcactgtaccccaaggaaagaaggcaaaggttaaaaaagaaagaaagaaaaggaaaaagtcagtggtgtcaagatactcacagctgcattatttttgtttgtttgttttgttctgttttttgagacagagtctcgctctgttgcccaggctagagtgcagtagtgtgatcttgcctcactgcaatctcctcctcccaggttcgagcaattcccatgcctcagcctcccaagtagctgggattacaggtgcgcaccaccatgcccagctaatttttgtatttttagtagagatgtgttttcagcacgttggccaggctggactacaccattttttaaataaaatgttgtcaatagacccaaagcctgacaatagaatcccaagtgaacaaaggctggtaaattgctgccttttgaagcagctgaagctgaacactggggctcggaagccagaacgcttgggttccagctcagctcctccagtcaccaagtgattttaaccgctctctgcctcagtttccaacctgtaaactgaggattgtactaagtcctacctcaagaactacctccaagcttcagtgagatcgtggctattgcccagtgcccacggactgaaggaaatgtcctgtagccacgagctacaatcaaccaccgcacaccctttccatccaagtgctctatgagatcgcagagaaaatggaaacatacgtggggtgacccaaggagctccccagcaaagcgggattgaggtacagagccaaaaaccaaaggaagagttacccaagcatggctgggatgtcctgagaggagcaggagcagacctttcatgccatctccagaccaggcccaggcaggtaagagggtgaacaggaccaggaattcgcacaaccccaggggccgacaggagaacctgcagaaccacggaccccagacctgcgagccaccaagatctgcgccggcctcaagcacaccccaaatgcactccagccgaggcctggccaggcccctggaccactgcctcggctcctcactcaggccctgcctccctggcggccctctcgagccccaccccacagccagctcctgcttaaacctagcaatgccccccaggcctggaattctattatcagcttgaactaggtcccgctgagagtgacaggaaacccaaataatggaaattgcaacgaggcagagtgtgttgaattctccccgggaggatgcagcctggagctgagctacacaggacgctggggaccaggccccttctgtgcaccccggccatccccggggagcccctcatcaggcggcttagggtggcttgccagccagaggcatcagatggaggaaaaaatcaaaaaagaagagaagcaaagctagcttccggcaagaggctgggactgctacaagacattctccttttgccccattggtcaaaatgtggtcacgtggccctgctttgctgcaaggaatgctgggaaatgtagtctttcttctagcagccatcttatcatggaaagaggggagaacagatattaggggacaactaaccagctctgccacagcggaaaatccagattccgccacggcctacaggctcctcctggtcgaccctctcgggagccccggtgcctcccttcctccatgcctggtccctctgcctgaagccttcccgccctctctcctggctccatgcatcctgtgggcctcccacaacgctggtgccagcaaagcccgatctcctctcccgaggccgcctgcattccccctgtgcgtgcatcgtaacctgtgtccctgactcacagggatccttaccctccccaaggtctgtgctccccagggaggagccaaacctctgggtgccctgagccccagccctgcagagcaggcaccccacgcggtggttgcaggcaccgggcagtcgctccatcctggttttcagcttttggtgcacagaagcatgaagaagaggggtcactggcacggagtcctccttgagagtgtgttccagtcggccaggcaggggcagccggggatccgtaccagtggtccctgcccacctgggttaggaaaggctggctggcctggggaggctgtggacggcgtctgcggtgtcatctgagtgccacggccatcgcttcgagacggcgtctgcttgctgcagccagccaaaggtcttaaggaaggccggggccactgtcggcaggtgtgtggctccagattgaaattgtgacaatacctccaaccatgcccttccgtcttcccaccgcgcaatccagtgcaccacctcccaccatgcaatccagcgcaccacctcccagcaaaacctccaggatccgcctcaaacccagccccatcccacagccaccaccctggtccgggccaccaatagctcttgctcagacacaggcagtcacctctccagggagcacccagtgtccattctgccctcgttctggtctatccttcacccacaaatggagagtatattttagcattagatcagttcatgtcactctcttgcttaaaacccccgcctggcttccactgcctggcatgagaatcaccgccacctgccctacgggactggccctgccacccctgccacctgccccatgcccgctcccctagctcatggtcccccagagtcactggcctccaccatcctctcagcgaaaccccaccagccaccactgcgtgccgcccacccaccccgccagcctctccatcacgtcttcctgccttcccttcttttgggaaactctttttttcttgtttgttcattttatcttctgtgtccccaactcgaatggaggccacgaggaacattgtctgtctcattcacttctgtgtccccagaacctagaaccatgcctggcacacagaacgtgcttaataggaactgagacagagacatacagggaaggaaagagggagagagacagagaaagagagagaaaataagagaaggggaaggagagatgggggagagggagggagaaccgcacactgaatccaggggttcctctcccacccttcatgtgcctatggtaacaagggagtccccctcttctgaccccttgttgtcatcaagcaagaacgtccgagccccaggcaccctctgaaattcccaagaaggaagcatcccaagaaggaagcatcccaagaaggaaggcccacaggacgctggtctggagccatccggttcccggtctgctcaccacgctcaaggagccccttaacaggaccaggaggagaacaggcacccagcctggggttccccccggacaaggccatgctgtgacccaggcttggtcctggccctgaccatgggaagcccaccccacaggccctcacccaggcaggcctgaggcccatgcaccactaaaggcctggagagggggtcccaccccagcctcacctgggtcccctggggtcagggtgagctgggacagagggaccacctgttgctatgggagagggagagggcacgactttcccagtggaatgggctcctgctgtgctctgagccctgggtcactgtccccactctggggagggaggggaggagcctggagcaccaagggcgcggctggcaataaaggcagatgctcaagttgatgccaccccacgcacgtgaggctgggaccaggggtggcactgacacggctggggagcccactcccgaggttcgacccggggatgtgcacagccacattccaaaggcgcacgggatgagatcagcccgggtgaccctgggactttgtcctcctcggcaggagccagccctgtgcaccctgtgtgcctgtccatctggaaggcccagcatgagaggcccggccgtcctcctcactgtggctctggccacgctcctggctcccggggccggagcaccggtacaaagtcagggctcccagaacaagctgctcctggtgtccttcgacggcttccgctggaactacgaccaggacgtggacacccccaacctggacgccatggcccgagacggggtgaaggcacgctacatgacccccgcctttgtcaccatgaccagcccctgccacttcaccctggtcaccggtgagtactgccctgtgacggggcctgggggtgggagggcctgagaaaccagatggcacagagccgtgtcgtgcaggataaaggggagaggtccttgctccaggcacaggacagagccaaggggaccattaggaatcctcaccgttggtagcaacagatccgggacaaagaaaaatgaccaggggggtccttaaacccgtggccacagccagggcagcaaccccagaaggcttcaggaggaggggagtgtggcgggctccccgctggctcccatggctcccctcccctgcccgcccctccagctggctgtgtcagcctctccctctcccttccatcctttccattttccacccaacacctccctgacagatctgcccaggctgtagacaatacagacataggtttttaaaaagccaaatatggggccaggctcagtggcccacgcctgtaatcccagcactttgagaggctgaggcgggcggatcactggaggtcaggagttcgagacctgcctggccaacatggcgaaaccccatctctactaaaaatacaaacattagccaggcatgatggtgcatgcttgtaatcccagctacttgggaggctgagacaggagaattgcatgaacccaggaggtggaagttgcagtgagctgagatcgcaccactgcactccagcctgggtgacaaagcaagactgcatataatatatatatacatatatatatacatatatatatgtatatatatatatatatacacacacatatatatatatatgaggccaaggcaggaggattgctggagtccaggaggtagaggctgcagtgagctgcaatcacaccactgcactccagcctgggtgacagagcaagaccctgtgtcaaaaaaacaaacaataataaaataataaaaagccaagtaccacaaaaaaggtgttagagaattgaaaagcaattggccctccctaggggctcagccacctcccaaacctgcgtcatcctccaaagaccctgcgtgggtgtcccagggcgcctgcaacaaagatctgcagactggcttaaacccacagaaacggatccgcatgcttctggaggccagaaggccaaacccagggcattgcagggctgcacccacccggaaggttccagcagaggctccctcctcacctcttctggctcctggggcctcggcaatccttggcattcctgggctggcggcagcatcactccgacctctccccacgtctccccagggcctttcccctgtgtgtgtgtgtctgtattcaaactttcctcttctcactagtacaccagtcgctgaatttcgggtccacacttctctggtatacatccccttaccctagctaatcacatctgcaaagaccctatttctaaataaggccacgttctaaggttccaagtgagcatgaatgtggtgggacaccatccaccccaacacaggcagctcatccccacaccagcctttctgccccttctaaccgcaaacggaggtgtgcgggtctcccgtctgcgcagcgcctcttttgctctctgtatcgcagatgaggacgggagggaccttctccacatcatctctccttttgcaccttttggacttagtaccatgtgcacgtgtttcctgtacaaaaataaattcaaaaaatctcctggagctccacgtagttcactgaaattcctgcctgggatctcgtctgatggctgggccatcatttatttaatgagttccttcctgacggccgtggaggtcacccgcaatcttttgctaaagcaaacaaggctgccaccaggatccctgcacacgcattcgtgcctgtgtgcccgtccagctgtgggacaaactgaaagtggaagtgcgattgctaaaacaggtcaaagaacacgtgtctatttgtctcagacatgacctcgaaccttggctcccacggggcagtgcaggaggaagtctgctccccccagccctgccccaggcccactccccacccagcacacagggaaacctgggctgttttgacttcgcctcttccagccctgggtccggccttcgctgtgaccccggtccatcccgccgccctctgcacctcttcctccctcaggcaaatatatcgagaaccacggggtggttcacaacatgtactacaacaccaccagcaaggtgaagctgccctaccacgccacgctgggcatccagaggtggtgggacaacggcagcgtgcccatctggatcacagcccagaggcaggtaatgtcacccccgcccatactgacatcgcagagcacgggggcacctaggcccaggtgaggcttggaaccatgtgagatccacggcaggtcccttccccactccagggtctcggggctcctggcctaccctggcacagaagggtgtgaagtagggccccaaaaggggcaggtggtgggtgctggtgaggactaaccagtgagctacgtccggctcggcccatggacacagccctgcccggtcctctctggggggccctgggagcaagagggattgctctgtccccctagtcggagggagaactgcacccttgggccctgcagcattgggggtgagggtcggacagggaagatcactgtgactcaacaagaaagcatttaacaattagacgactttctccctttccacatccctgtcacagctgaacagctaaattctaaagggccaaagacaaaatgagaggtgggttacagtattgacccaggaacccccccacccacccccagtttgcaatgctctgggggcttcctggcccagaggcgaggcttccagtaaacaaagtcagtggaggtttccaagatgacgctggaataaatgtcagagcccatgcccaccccagagccaagttatccactcaagccggggttccctcactccagaaggatcatagacacactcagggctccttccaccggctggtgagcaggaagccaaggtagagaccctggcatcacaaggctcttgatccaatgaaagaatatcctgggggagtggacgggcaggtgggatggacagtgatgaggcagacactgcgtatctgggaacattttttttttttttttgagacggagtctcgctctgtcgcccaggctggagtgcagtggcgccatctccgctcactgcaagctctgcctcccgggtttacactattctcctgcctcagcctcccaagtaactgggactacaggcgcccgccaccacgcctggctaatttttttgtattttcagtagagacagggtttcaccgtgctagccaggatggtctccatctcctgacctcgggatccacccgccttggcctcccaaagtgctgggattacaggcatgacccactgcgcccggcctctgggaacatctttatactgatgtcttgtttagtgctcaagtccagtgggcacctgttgtttcctctataaaatcaggttttacccccatagaacatgagatcagggatgttttagaaattaaaggccccgcagctgcagctaggagcagggatgggtgggtggaacagagaagtaggcacgtgggggacaaatgtgttcacaggcatgagacaaggggcagcccactgaggagtcctgtctttcacgctgccttgtctggcagggcctgagggctggctccttcttctacccgggcgggaacgtcacctaccaaggggtggctgtgacgcggagccggaaagaaggcatcgcacacaactacaaaaatgagacggagtggagagcgaacatcgacacagtgatggcgtggttcacagaggaggacctggatctggtcacactctacttcggggagccggactccacgggccacaggtacggccccgagtccccggagaggagggagatggtgcggcaggtggaccggaccgtgggctacctccgggagagcatcgcgcgcaaccacctcacagaccgcctcaacctgatcatcacatccgaccacggcatgacgaccgtggacaaacgggctggcgacctggttgaattccacaagttccccaacttcaccttccgggacatcgagtttgagctcctggactacggaccaaacgggatgctgctccctaaagaagggaggctggagaaggtgtacgatgccctcaaggacgcccaccccaagctccacgtctacaagaaggaggcgttccccgaggccttccactacgccaacaaccccagggtcacacccctgctgatgtacagcgaccttggctacgtcatccatggggtgagtcgcctgctggaggcaccacctccaggggctccctccccaggctctgggtcttctttttttttttttgagaccagggtcttgctctgttgcccaggctggagtgcaatggcaggatctcagctcactgcagccttaaactcccagactcaagcgatccttccacctcagcctcctgagtagctgagaccacaggtgcacaccaccatgcctggctaatttttgtgtgtgttttgttttgttttgtttcatttgagacagagtttcactcttgtcatccaggctggagggtaatggtgccatcttggctcgctgcatcctccacctcctgggttcaagcgattctcctgcctcagccctctgaggcattacaggcgcctgccaccatgcctgactaattttttgtatttttagtggagacagagtttcaccatgttggccaggctggtctcgaacttctggcctcaggcgatccacccgcctcagcctcccaaagttatgggattcaggtgtgagccactgtgcccagctgatgtttgtatttttttgtagagacagggttttgcatgttggccaggctggtctcaaactcctgggctgaagcgatcctcctgcctgggcctcccaaagtgctggaattacaggggtgagccactgcgtctggcctctccttccatctccatagaggcacttcctgtttctagctggtccccagtttgaggagtgtcagcaccgaagggacacttccttcactatgcggtagggtgtgtgcacatctgtgtgtgccctccacattcaggcaccaggcagtgggagtgtgtgtgcacgtctgtatccatcatgaccaggcactgtgtgataggcgtgtgtgtgtgtgtgtgtgtgtgtgtgtgtgtgtgtgtgcgtcctacgtgtccagggtaaagtgtagaagtccagccccaagggtgacatggaagaggtaggaaagagtcaggagcccaacctcccctcagcagacagcacagggatgctgagccggaagcgaagcacagattagggagcagacatccccggaaaggaagtgaccgatgggaggcagcgttcaacaccgcacaggcggcaggccccgaagcctggagctgcccgctccactcccatttactcagggtctggtctccgttcatttaactggaccttccctgaacttcactctttagggtgactgatctttggaggctcagaattcggggaaactgagtcttggaacccctccagccctcacgttggtgctccttcctaagggggtgttcatagggtggatagggtaggcggagagggtctgttgctcccagcaaggacccaggacccttgcccgctccccggcagagaattaacgtccagttcaacaatggggagcacggctttgacaacaaggacatggacatgaagaccatcttccgcgctgtgggccctagcttcagggcgggcctggaggtggagccctttgagagcgtccacgtgtacgagctcatgtgccggctgctgggcatcgtgcccgaggccaacgatgggcacctagctactctgctgcccatgctgcacacaggtgagggcagggtgccccaaatccccgcctgctctggtgtgtacacgtgtgcacacgagggtgcctgcatgcctgtgaccaggacacccttgagccccaagtggggccacctcccctggctttggagaacaccagaatctctcacattcccacaacacgtgacctctcacgagcacctcatgcatctcgggcggcacgagagggcgagggggaggagtgggcagtcttgctcaagaaggggctggagggagcgagggtggcccaggcgggcctgctgtgcagagcccacctcctggctgctggatccccactccccactccccaccacagcaacctgagggcctcctttctggaatcttcctgtatcagcctcccacacacacacctccccactggaacctgccccatcttggggacaaaggccacctggaaactgacaaggtggcgaccccggcgggggcctggctggagaggggtgggctctactgagcagggctatgaagggccgtggtggacaaaggccatgggaccaagggggcggtgaaagaggaaggaggggctcgtggggaccaacagaggaccccgagtttactgtggagaggctggggtgaggagccatccctctctccctcacaggtcctctggctttccttagaatctgctcttccgcctgatggaaggcctactctcctgcccaagggaagatctgctctcccgcccagcagcaggcccctcctcgtgatgggactgctggggaccgtgattcttctgtctgaggtcgcataacgccccatggctcaaggtcagagacccagaaggcagaggcgggagggtggccccacgctccctgaccctccaccctgatgtcccagctacagtcctaggcaaccagaacagagctgccaggccccgccaagcaggtgactcccactgacctggctgccccagagaggccatcacccctgagatcccgaggctgacccttccagcctctctgctctgggcttggaggaggtctttccagagcagaccacccggaccagtggccagaattcccaccctcccccaaaagccagaactccctcagcctctggccagagctgctgcctcccctccttcctgccatctctgtgctccactgggatagctcggaaaccgtcacctgcggtgcatttgggaggagagctctggggctgtgttcctggaactctccaggagcctcctaggacacgcatgaggtgtgtttggtaggagagcaccagggctatattcctggaactctctggaagcccacctctgaggacacgcgtggggtgcatttaggaggagagctctggggctgcgttcctggaactctctggaagcccacctccaaggacacgcgtggggtgcatttgggaggagagctccggggctgcgttcctggaactctctggaagcccacctccaaggacacgcatggggtgcgtttgggaggagagctccggggctgtgttcctggaactccccgggagcctccgaggacagtgctcccttgtctgtctgtgcagccacagcctcctaggccaagcagaagaaagtcattcattcatcccgaaaatatgtaacgggagccagctccatgccacgctctggtctgggctcaggatatgcagcgaacaagacagtccaggacctgtcatttaaaggtgcaagaaagcagagaacacaaaagcaaatgaatccacgcacagagtgctcagatgcttgtgatggcaaagaagagacggccacaggcagggacgaggcaggcgcgaccttgtcatttgcccggcctggaatggcctctctgagaaggtggatttagggagaaaaccagaatgacagacacaccagaagaagccagacacaccaggcaggggaaagagccagggacaggcccgcggtgggacaggttcggcgtgtttgggatgagacagaaggccagtgtgcctgcaggttggcacagagcgaggctctaacaggagctgaccacagccccaaggcaggaggttgtgggatgcacagcggggagccccaagctgaggttacacagggtctgaggttgatgattaaatgagtggctcccactgctgggccggggacagaaacgggagcaggaagtggccagtttggaggtggctgcaggacccagccggacattccagtggcggggtggagaagctgcaatgtgcacagattccaaatacctttaagaggcacgacattcgaggtttgtggacagattatgtgggagggtgaagaaaatgcaaaaatgaaagatgggtccaatgcttgggtcctgagccacttgctgacatgctaaactgttggggacaggagtcgggggggccgagacttgtttcggccgtgatcagcctcaatgccggcgacgcggccacgtgcagctgttcctgggcacaggttgtgcagatgagtccacagccagggatgcagtttagtctggcaatttaaatttgagacttgtcaacacaagctatgggactcaatgaaagcccccagccagaaggagtggactgagaagagatggtgaccacaccactcactgagaaggcggggctggtgagacaggaaaagccaagagcttgtcatgggtcaagaggggaatgaggccaggtgcggtggcttccgcctggaaccccagtacttccagaggccgacgcaggaggatcgcttgagcccaggagttcaagaccagccttggcaatatagttagaccccgtctctgtaggaaatttttttttaattagctgggcatggtggtgcgtgcctgtaatcccagctactggcagggagactgaggtgggaggatcgctggagcccgggaggtggaggctgcagtgagccttgttcctgccactgcactccaccatgggcaagagtgagaccttgtctctacaaaataaatcaatgaaagagaaaggagcgggtttagggtttagagaagtaggaatgtggagatgtgtgtggtggggaggaccattcatgccaaatgtcacatccggaaggggaccagaggacccttcagcccgaacccctcaggcagacgaggatgctggaacccagaggcgttagctgactggtccaagggcaccaaagagtggctggtggtgtgtaaatgccagttttaaggtcctggtcccgagtactttcagccacaacgcctgcctctctgtgctcaggggcttgggtcctgaagcaagtcttccagcactaggcagggaagtgataaggtttccatggcgctagagtccacaaccatttgttctccacattaaccaagagagggactcagaaaaagtcattattcagactcacacacaaggaaattgaagcacagaaaatcaaagatcatgtgactctgcatattctcacacggcttttccccagaggagcagccacggtggcgtcccagcaaacctgctctccagatccccctcaaaaagccctgctgttggcccttacccatttctgcggcgtgaatactcccaccatggcccatttcaagctaccaacgtgaggtcaccgaacacaaagtagggaagaagcccgcagaatcatctttcacaagcagcatctgctgggctgagcaggttgctaagagctggggggtccgaagttttcatcacagcctggtaaagtccatttggaactaggctgtcttctgtggctagcttcttttcttttcttttcttttcttttttacacagattctcactgtgttgcccaggctggagtgcagtggtgcaatcacagctcactgcagcctcgacctcctgggctcaagcaatcctcccatctcagcctcctgagtagctgagactacaggtgtgcaccaccatgcccaactaattttttaatttttaatttaaaaaaagaaaagcaagctatgttgcccaggctggtctcaaactcctggcctcaagcgatcctccagccttggcctcccaaaaagctgggattacaggcatgagccactgggcccagtcccttgggcccatttctttcctctgaagctagtgttgaaagtacatgtggccagttaaaggcacattgtggaacggacgcagtccttgccctgactttacagagtcctccttccccagccagaaaagcgggcagaagactaggggaagctcttctgcctcctgggatccgcacactgccagccaggcctgggacagtgcccacccctcccctcccagccctgggagaagggtctgaagcctgacatcagcacgccacccccatgtccacacctgccccgcacctgtgccctcccaggaatccctacacaggcccttctcagcgcagcctggtagggccgcccccttccactgcctgccgccccccctcccccagcccaccatcctgtttcccacgacccctccctcccagtccagccgcaccgctgcttcacctgtcccaccagacctgccctcagcctgccccatcctctcctcccagaccaacgcgtgctgcttgctcttccaggaagccgccgggagctgcccgcaggccctgggccggctgtctcgctgcgatgctctgctggtcgcggacggaccctgcctccccagcttatcccaggccagaggctgcatgccactgtccccggcagcgccaacccctgcttggctgttatggtgctggtaataagcctcgcagcccaggtccagagcccccggcgagccggtcccataaccggccccctgcccctgcccctgctcctgctcctccccttcgggccccctcctcctgcaaaacccgctcccgaagcggcgctgccgtctgcagccacgcgggggcgcgcgggagctctgcgggcgctggaacctgcagacccggcctcggtcagctgggaggggcccgccccggcacaaagcacccatgggaataaaggccaagccgcgacagtcagcacgggggagacttttccctaaagcctgccggtttcccgacggtcccaccattgaccccagcgtgggataaatttctaactccttgccaggcttcacaagccccagggacccctccattctcgttaggggtgggccctggttggacggctggccagtcctggaaaaggggtgagtttcctaaaaggaaggggggaaggcatgaggaggctttttgtgaacgatagggaagcagcatctataagccacggtgctcagcaagaaatcacgttaaaccaggcggaaacaccgcaaagaaagtcgcgtggattggctctgacacaggactggggtggccgtggccaggagccgagggacccttccacacctattctcctgtgcattaagagcataggctttggagtcagataaactcatgttccagccctggccccccacccagatgctgtggcattggcaaagcagttgaccctccccagcctcagtttcctcatctgaaaaagtgggataatgaggaccatgcctgcctccctggggtacctgagagtaaggtggacacattgcggggaggctggcacagaggctggccccaagcaggtgctcaaggatggcagcccctgggaggattaaaatcctgccctgggaggtgctgggtttgtcagtgccaccctgcatagtaaaccagctgggacaccaggagacacagtctttgaagtctgagtttgtcagatctgcctatttccctgcctccaaagcccgcagcccctagcccccaccccgggtctcctgcttcagctccatggagtctccagggcccattccagcctgctctctgcagcagcctgattggctgcctggggctgaagtcctgcctcagcctgaagagcctggactttggcctggcctgtgggccccctgccccacaatccaattgttcttcctggaaggactgccccggtccccatgccagtgcctgcagccacaccccatgacacccaggccagccacccacctgcacaagctctggctctgtggctgggctggggaggggagggggggaccctccctggacaggcccaattccagtctcagcccacctcagcctgccccacctggccagaggagaccaggtagagtccacatccacgtcctcggagtggtgagcgctcacagtgccggcactgccactgcccagtctccaagagaagccctgccttcctctgagccccccaccaccaccaccacatttgctcagccctgttcatcagcgttgcagggactgggccaaccagagctgtgagaattgcctcatccacagaagaagaaaagaaacagagaggagaaagaaagaagagagacaggaaaataaccaagtctgtctcacattcagtattccattgctccagatgtctggtgtaacaaaggcatcaccaagagagtcctggtggctggccgagcactcgctgatggagcttccggtgtcaggagcatgggggctgaggcctggctgcacgcatggggggctgattttcctatctgtgcagccctaggtgtcaaatgtgaggggtgccaccttgagcagcacagtcccagttcaaatccagctccccctctccaacacctgctctgtggccctgggcaagttgctaacctctctgggcctgtcctcctctgtaaatccaggaccagtggcaggacctgtctcatagggtggtctcagtgataacatgagttaatattcacaaacagctgcgaacagggcctgctacatggaagacctgggtgttaggaagagacagggcagcaattaccttgtatcaaattgtgagaaagtcattcactcttatagactcacctccaagccttcttgcttctctagcagaacgtctctggtccataatcccacccctaacaggtgtcttctgtgacatgaagagaggcaccaggctcagagctccagcagccaagcaacagcataggatggacggttgccacagcttgatttgccttgtgtttgtttttataatcaccttcaatttttggttagtgctactcatttttcattgacatctgttttttttctttttcctttttaaaattaatttaagcgattttttttttgagacagtttcactcttgttgcccaggctggagtgcaatggtgcaatcttggctcactgcaacctccgcctcctgggttcaagcaattctcctgcctcagcctcccgagtagctgggattgcaggcgtgtcatgtgccaccatgcccagctaatgtttgtatctttagtagagacagagtttcagcatgttggccaggcttgtctcaaactcctgacctcaggtgatccgcccacctcggcctcccaaagtgctgggattacaggcatgagccaccatgcctggcctaatttaagggatctcttcatggtccttaaaaaagtcttttttttttttttctttgagacagtcttactctgtcactcaggctgaagtgcagtggcgtgatctcagctcactgcaatctccactttccaggctcaggtgatcctcctgccttagcctcccaagtagctaggactacaggtgcctgccacctgtaattatcagcatgcccagctaatatctgtatttttagtagacatggggtttcacgctggtctccaaatcctgacctcaagtgatccacccactttggcctcccaaagtgctgggattacaggcagtaagctactgcacccagccaaaagagtcttttaaaaaattaaattagccgggcacaaaggcacatgcctgcaatcccagcacggtgagaggctgaggcaggaggatcgcttgagcccaggagttcaagaccagcctgggcaatataatgagaccttgtctctacaaaaagttttaaaattagccaagtgtggtggtgcatgcctgtagtcccagctactcaggaggctgaggtgagaggatcgcttgagcatgagaggttgcagtcagccgagatcgtaccactgcactccagcctgggcaacagagcaagacactgtctcaagaaaaaatcatattaagtaacaaagaatgagctgattcaaagagaaatgttgactaagtaataatgaaggtggctgggggacatgacaaactatatacaagaggttggccaacggcaaacctgctgggggtcatcaggctctggcctgcctcctctgcccaccaaccatgtggccagcccaagaagtttctggagagtagcactggcctcccatggacagcatccaaagattccccccagttttccctgcctaatgcacggtgtttcccgggctatcagatgaccaagttcagaactgctcaacaccgaccttgcaattgactatgcaaagctcattttaccatcggcccaactgaaacagactcggaagaaaaccacaggtgacacaaagccgtgcactgcatattggagccacttggagctgactggggacgagtcacacagacacatcatccacacaaacctgtcaacccagatctttctctgaatttagccagtccaggtgctagcagtaacacacaaaacatccaggtactgactggggtggttcttgcaaggcaggtcataccactgggacacagaaagcaggcttggggacaggcatggtggctcactcctgcaatcccagcactttgggaggccgaagcaggtggatcaccagaggtcaggagttcaagaccagcctggccaacatggtgaaagagggatcaccagaggtcaggagtttgagatcagcctggccaacgtgatgaaacctcatctctactaaaaatacaaacattagctgggcgtggttgtgggtgcctgtaatgccagctactcgggaggctacagcaggagaatcacttgaacctgggaggcggaggttgcagtgagccaagatcgcgccactgcactccagcctgggtgacaagagcaaaactctgtctaaaaaaaaaaaaaaaaaaaaaaaaaaaaaaaaaaaaaaaaaaaaaacagaaaagaaaagaaaagaaaagtgaaagccagcttggttaggcagcccctccccagtggagtcagctctgtatactgtcaccaggaggcggcgctcttgggcccctcaacactcctggaagccttcctcacttcctcaggcaccttttgaagcagtgagaattgagaactcccttctgttcctccacctcctccctctcctcctcctcctcattcttctctgaaaaagcttcagtcctgctcagacccagccttgagatagtgatcaaggatacttgtttgctgaagtcttagatggacccccaagtgagccctggtagttcagagaggagaactggaaccctcagggccaggtttttccggggaggtggggagggatcccctgagggaagggatcccctgagggaagggatcaatagtcccatccctagcacaaagaccaccgtggatcagtgatttccaaatctgagcaagcctcagaatcaccttgtgagatctggggcgcggggggcacaggcacatccactcccacactccttaacctgaaggtctagggtgggcctgagactctgcatttctgaccagagcctgcgtgattccgctgctgctggcctgggccagacactccagaatcgctgcacctgataaaggttatggataaatgaatgcatgagggagtgaaagctggtcctgcccatcctcctcaggttaaacggatgaaaaggcagcaccacccctgggccaggaactgggcagaggagggaggggagcacaggcacctccaggctcaatcccagtggggcctggccagctccttcccagagaggcgctgcttgcttatgcaaacaagccctttctttccagaatgcagggagcacgggcccagattctctcctctgcactgacgtccggcctctgtcaaaggcagggacttccttggttcaccataagccttttcttgtgtcccgggtcggaacaggagaacctgtaggttcatgtaaccgacaagtctgttcgcgatgccgtcctgggctccttaaggcctgggctccccatctttagtatgggcgggttcatctcccacaagccgatcctaagagccaataaccacgcctgaggcttccgacctaggagctgcaaacacctggcgcgggggactctcaggggaaagaaacagcaggaattactctgtccccagctccaggccggcagaggacccgagtgaggtccccgggttccccgggcaagcagcagggaccgaggagggcaccgcgtcccgacccctgccccggcgccccaccaggagggatgtcaaggcgagggaggattcccaggggtgcgtgctggggcagcccagttcctccgcgggcttctttgggacgagcagcctcccctcccccacgcccgccttctgaggtgcgcagggccccctccccaccgcagcggcgcgggggctgcaggagcatctgttgccatggtgacgcgcggcgctgcgctcctcggatccggcgccaccgccgccaccaccgcagtccaagaagccgagagctggggctcaggcgggaccgggacaccggcatcccgcacacgcgccacacacactgcacatgtgcgacgggcatccacgcacgctgcacaccggcacactcacaggcacactcatgcgcttgccaccccatccccccacccagacacagacacacaacacaacacacacgcacacactgcacacacctggcaccgtgtgcaccacctcatgccacaagcagccacacaccccacacgcgcccgaacaacacccttcacccacactgcacacgctgcagccctgtacacgccacataacacacgcaccccacacacccactcgggaccccgacgcgggtgaacaagcgatgggaacaggccctcggggtgggccgtagcgggtagggcgggcggcgggggtcgcacccgggtcggcgcacgcgcagcaggctagtgccgccccctccccctcgccggctgccacgtctttgccctctccgcggccgggccctgcggggcaccctgggtgcccgacggcctccgggagcgcggtgggctccagccccgcaccccgcgaaggaacggtcagcgcagtcccccgggccctccgcccctcgccgggccttgcgcgccccccgccgcccggagcgcctgagtaccgcatcccagggcgcggcgcagccaacgcgcaacccgcccaggtcaggggtgcccgcgcctgggccgccggcggtgcggtcccgcaagggcgagggagggactgggcctcgggacccccatccccgggatgcctccgtgcctagcccggaccgcgccctggaagagatcgcccttccatcctgtggggttggaggagggatggggcacctctggggcggggcagggacccgggcccctcgcgcacccgcggagccgggaaagcgatccccgaaggccccagtctctcctggcgcctggagaacccaatcaggctgtgtttttggctttggttttggtgacagatcactgtgtgacttttggcttcaatgtctgaagaggttcaaacagtggagagacataaccctaagagaactgtccatcaccacggatcaatttacgtaaatgagttttctcacggtccaagcccatcaaaataaaaacaggtttggaattgattctgggctctgtcccagataagaaataatatttatccaatgacatctgaaccattgggaaaaaatacaatcccacccatctcattaagagatgcagtccaacaaaaatttaacttttatgtatataataaacatatactgcaattttaatatatttatgctggtttgatcaatttaacaattcaatttaatattcaatccagaataaattttttaaatactgagagccttagagtcacaggaaataaaatattttaaatctaaattatggttcaaatattgatatttctagacctggtctaattctaaaagaatttactttgatgagcatttttgagacataggttaatattttttaaagtttgaataactgatgtgcctgttcttgttgcagacatatgcttgggtgagcagtgaattactttcaaacataaaaatattttttattacaataaggttttggagaagaaatgaaacagaacccagaggtaaagaagaaaaggatcaaaaagaacctgcccttttattgggtcacattgctaccttatttctatttcattggatacacttaaaaggattgcccaaggaaaactggaggcagattgcacttagaaaaaaaaagctttcttgcaaaggagccagacttcagaaggactgactcaccaaatacaaaaatccaacaagtatttaaagggaaaaaaaattcccaagagaatcaaggttagtaaatgtacattcctctgtctctggtggttagcggcagcttcctcacgtgattatgctaatcctaaaagctaggacaccggcttggaaaagcaaaagtcacagctaaaattcttgttattgtagagtccaggtccacaggaagtagttaaggttttataatttggggactctgtgatttttggtttcaactgaagaactgtgacttcttcaatgatattggaagcaggataaaatgtcagctttggcttctatagagagaacagcagttttatttttttaaatgccaaaatttacagtacactggaaatcacatactttgcaaccatgtaaacttcatggtggaaaaatggtagctgtcaatcttaaaaggtgtcaagggctattatttttttaaattattttccaggccatgtgggtgaagacacttggaggccatgaccctaggccagttcctttttggacagaagaagaaactgaggtttaggggaggagagtgacctgtccactgtccacagctgataacaagcaagggaggcggtgcaaacgcccaacagcccaggaaagatgacacccccaccacccatcgttagagaaaagtaaattaatgccacagcacaccccctaggatggctagaactttttattttttttaaaaaaaagaaaataacaagtgttggtaaggaggtagaaatgttgcagccctcagagatggcaggctggagtgtaagacgatgcagcttccatgcgaattctgacaattcctcagtaagttacacatggaataatttattgaattattgaaattatttgaataatttattcaaactttttttttttgagatggagtttcgctcttgttgcccaggccggagtgcagtggcatgatcttggctcactgcaacttccacctcccaggttcaagcgattctcctgcctcagcctcctgagtagctggaactacaggcacacaccatcatgcctggctaatttttgtatttttagtagagacggggtttcactatcaggctggtcttgaactcctgacctcagatgatccacccacctcggcctcccaaagtgctgggatgacaggcatgagtgagccaccgcgcccagtctcaaacttttaaaaacagtaaccgcgcccagtctcaaacttttaaaaatagtaaccaatgtcttttaaaatgctcatcaagtaaactcttttagaattaaaccatatctggaaatatcaatatttgagtcataatttaaatttaaaatttcctgtgtaaacatatgactcagcaattacactcatgggtatacacccaaaatacttgacagcaggtgttcaaacaaaaacttgcacacagatgtaacaagcagcatcattcacactcaccaaaaggtagaaacaaaacaaatgtccatcaaagatgaatggacaaacaaaatgtggtctatctatataatggaatactatttggccatgaaaaggaacaaagtacttagccgggcatggtggcttatgcctgtaatcccagcactttgaaaggcacaggtgggaagattgattgagcccaggagttcaagaccaacctgggaaacatagcaagaccccgtttctacaagcagaaaaaacaattagccaggtgtggttgtgcacaactatagttccagctacttgggaggctgaggtgggaggatctcttgagccccggaggtcaaggctgcagtaaactatgattgcaccactgcactccaacctgggtgacagagcgacacgctgtctcaaaaaaaaaaaggaatgaagtactgatacatactttaatatgaatggaccgtgaaaaacatgctcagtgaaagaattcagacataaaaggccacatattacacgattccacttataggaaatatccagaataggtaactccatagacaaaaaggagatgggaggtggccaggggctgggggaggagggtgggaagtgactgcctaatggatttctttttggtataataaagacgctttggagctagatggtggtgatggctgtataacattgtaaatggactaagtgccactgttaaatggctaaaatagtaaatgttatgtgcattttttttttttgagacagagcctccctctgtctcccaggctgcagtgcagtggcgcaatctcagctcactgcaaccttcacctcctgggttcaagtgattctcctgcctcagcctccctagtagttgggattacaggctcacaccaccacgcccagctaacctttgtatttttagtagagacggggtttcaccatgttggctagtctggtctcaaactcctgacctcaggtgatctgccagtctcagcctctcaaagtgctgggattacaggcatgagctactgtgcctggccctgttatgtgtgtcttaccacaactaaaagaaaacagattctggggccacatcttaaaaaaaaaaaaaatagtggaaggcagataatgaccatgtttcagacagggtttgcccagtggcttccacagagctgtcccatctttggggtggttaataaaagcttctgttgggagactcagagggaagggctgggtgaagcgagcctgacttgtcctcacctgagatccatcagctcccaccagagcccggcaggagcccggactccttggtcggagaagcacggagaaggtggccaagggcaccgcagagagccccagcaaacttccccttcgggtttttctgggccccagctgtgggccgtcaaccaaactttgtgaatcgacactggtgactcgacatggaaaatgactctccgtcatccgattcaaacgtcatcagattgcttttggtgtgggaagcagagcacaccttaacaaacacctccccagctgtcccttttaataaaatacacaggttgaatgtatttccaattctggaattaatcagggaagtgggtggttttttttttttttttgagatggagtctcgctctgtcgcccaggctagactgcagtggcactatctcagctcactgcaagctccgcctcccgggttcacgccattctcctgcctcagcctccccagaagctgggactacaggcgcccaccaccacgcccggctgatttttttgtatttttagtagagacggggtttcaccgtggtctcgatctcctgacctcgtgatccgcccgcctcggcctcccaaagtgctgggattacaggcgtgagccaccgcgcccggccggaagtgggttttttaatcaccagctctcgggagaaacacattctggagagcaaaaggcaagaaccaaccttttcaacaaaccaacctgcggagaaacccctctgcgagtccagtgttgtaaatgaaaatgttaccaggccgggtgcggtggctcacacctgtaatcccagcactttgagaggccgaggtgggtgcatcatctgaggtcaggagttcgagaccagcctgaccaatacggtgaaaccctgtctctactaaaaatacagaaattagccgggcgtggtggcaggcgcctgtagtcccagctactcaggaggctgaggtgggagaattgcttgaacccgggaggcggagctttcagtgagccgagatcacgccaccgcactccagcctgggcaatcgagcaagagtctgcctcaaaaaaaaaaaaaaaaaaagaaagaaagaaaaagaaaaagaaaagaaaacgttagctacacacacagcttaggggcggctccctgaaatttgtaactgtttagccccgggtgtgtctgtccaggatgggtcatgtctttcaagctgcacatgcccacaggagagctcacccccaaaatgctgcagctgtcacaaggttgcctcttgttcatttggttcttaacatggttgttcttcggactttgataaagaatgaatggttttggctgggcgcagtggctcacacctataatcctagacctttgggaggctgaggggggaggatcgcttgagtccaggagtttgagaccaacctgaccaacatgacaaaaccccatctcaactaaaaatacaaaaaaagtagccaggcatagtggcgggtggctgtaattccagctactcgggacactgaggcacgagaaacgtttgaacctggaaggtggaggttgcagtcaggtgagatggtgccactgcactccagcctgggtgacagagggagactttctctcaaaaaaaaaaaaaaaaaaagaattaatggaaatggttttggcggagtgcagtggctcacacctgtaatcccagcactttgggaggccaagtagggagggtcacttgagtccaggagttcaagaccagcctagacaatgtagagaaaccacatctctacaaaaaaatttttttaattagccaggcgtgatggtgcgcacctgtggtcccagctacttgggaagctgaggtgggagaattgcttgagcctgggagttcaaggctgctgtgagccatgatggcaccactgcactccagcctgtctcaaaaaataataatgaatagaaaaagaattaatgttttccatttatatcgttttcaaaagaggtttgctcctctcatatgaaactgagacagtcaattctgcaaagaaattcaaatggccagtaaagcataggaaaagatgttcatcctttctaaagaaccaaaagttccaacaacaatcagatgctatttggatctaatgattgtttttgaaggcaatacttgaggctggggccctgccaccgcccacccagaatgagacccattaatcatcatcacccagggcttactctttctttttcgttattggttttcacgtccagctttgccattgatcatacacgagacctggggcaaatcattcactccctctgtgccgagttttctctttgttcagctgaggagctccacgtggtatttgcactgtagagtgggcaaggccctctgctattccgtaggctgagtggggccccgtcctgctacagtgacccaaaggcaattgtgaacacaagacaaaagcgttacgtattttgtgttgttttcatctgttcctgctgctgtcacaaaacaccgcagactgcgtgatttataagtaatagagatttatttctcacagttctgaagctgggaagtccaaggtcaaggatctccgcttcccagatggcacctcgttgccacatcctccagaggggtaaaatgctgtgtcctcacatggaggaagggaagcccttttataataaggctctaatcctgccaggcacgggggcttatgcccgtaatcccagcactttgggaggctgaggcagacagatcacttgaactcaggaactcaacaccagcctgggcaacatggctaaaacctgtctctacaaaaaatttaaaaattaaccaggtgtggtggtgtacacctgtggtcccagctactcgggaggctgaggagggaggatcacttgaacccaggaggtggaggttgcagtgagccaagattgtgccattgaacaccagcttgggcaacacagcaaaatcccatctcaaggccacgcgtggtggctcacgcctcccagcactttgggaggccaaggtgggtggatcactcgaggtcaagagttcgagaccagtctggacaacatggtgaaacccccgtctctactaaaagtacaaaaaagttagccgggcgtggtggcaggacctgtaatcccagctacttgagaggctgaggcaggagaattgcttgaacccagcaggtggaggttgctgtgagccaagatcacgccactgcactccagcctgggcgacaagagtgagactctgtctcaaaaaaataaataaataaataatacaaatctcatctcaaaataaaataatataatatatgaggctctaatccctccccggagggcagagccattacggccttctcactcctcagtactgttgcactggggattaagtttcaacgtgaattttggagggacacaaacattcaaaccacagttaagtgttgacagtgtcctgaggcgacaggtccttgcttccctctcgtccatgttgatgatcaggcgacccgctggattggtttcctgcggctgctctgagaaagcaccacagactgagggcgttgagccacccaggtgtgttccctcgcaggtgtggaggccagaagtccaatccagagaggccgtgctcactctgcaggctctgcagaggtcccgtccttgcctctcccagctgctgtggacgccagtgattttgtttcatgtttttgtttttgtttttttgagacagagtttcacgcttgtggtgcaggctggagtgcagtggcgccatctcggctcactgcaacctccacctcccgggttcaagcgattcttctgcctcagcctcctgagtagctggtgttacaggtgcccgccaccacgcctgactaatttttgtatttttagtagagatggggtttcaccatgttggccaggctggtctcaaactcctgacctcaggtgattcatccatctcggcctcccaaagtgctgggatgacaagcgtgagccaccgcgcccagccgggacaccagtgattttggcccacgccttcctgtgtgctgctcggtatgaaggaaagccctttccctgaaacccagagaccctccacctgcttttatttttcacttttgatagagacacaggtagtggaaatagtttgctttcttcttaactataagaaaagcaacagcataaacacagttacaaacagtggtcaacctctggtctcagtgctgagtgaccctagagagtgctgggatctgtggcaggaatgagaggctggtgaggaagccgcctatcctcatgtgtcgaccagcccagggtggcccgatgaccctgtttttgtttttgttttttttgagacagttttgctctcgttgcccaggctggagtgcagtgacaccatctcggttcactgcaacctccgcctcccgggttcaagcgattctcctgcctcagcctcctgagtagctgggactacaggcgcgtgccaccacgcccagctaatttttgtatttttagtagagatgggggtttcaccatgttcgccaaggggtgaacaggctaggtgtgcccagggcacttcatcccatctgctcagccacaccaaacccagagattcagggtgcaacctgtggtgatctcgaagtgaaaatatttcccttggattatctcataacatttcacagtggaactagaaggaggatgttgaggcataaatgaagccaaaggcttaattggagggatgtggaaaggcaacggagaggccgcagcatggttgtgtggaagaagggcttcagcgttgttgagtttcaattgcaaagccacctggaagcagatggggaaagcctctccatgcaggagaaagaacagtaaaagttcccaagaaaatgttctcgagagcctcagccccaaacgcaaagtgctcaaagagctgccactgatgcccaatatcaggccagcccagcctagaataaggacatcaaacacattggagaagggaaggatagaagctgttccccatcatcccccaggccccatcctgggagccccgtcaccaaccacctttctctttagtcctcagctggcctcgatattgtcaccaagtaaactttggggtcaacaaacatgggtaggaaccaacattagcacggtcagcaaatgcgcccctgctccagtagctgggtctttatattgtatcaggaatcctcctggtccacctccccctcacccattccttctactcaaccaagctcccgtaccacgccacccccacccctcttcatcggccaagctctcccccacctcccaaaggcagacacaacctcatctcagctcgccaccgtccgccaggggagactgacacacattgaccgctccccgtgccacctctgctgtgcactaatgcattcgcctaatttccagtagtcagtgacatttcactgtggaggcagaggtttccactcacgccaactcaagtcactgcagccttcatggagctcaggcaggattcgaggccctaaagaggggtggtaaatagtgaaggaggttacaggcacaaggcagagaaatgatggtgccttcccattccaggtttacttttttctaaagcatttactaaaactaaattggaacatctaagttggtgattgcatgattgagatattggagcaaaagaacagcttggttgatagttgagttttcacatggacagtagaatcaccgacgttttgctgtaggtataaaatgatttccaggctgggcaaggtggctcatgcctgtaatcccagcattttgggaggctgaggcaggcagatcacttgaggtcaggagttcgagaccagcctggccaacatagtgaaaccctgtctctactaaaaaaaaaaatacaaaaatcagccaggtgcggtggcacccacctgtagtctcagctactggggaggctgaggtgggaggaacacttgagcccaggaggcagaggtggcaatgagccaagatcaagccactgcattccagccttggtggcagcgggagactacatctcaaaaaaaaaaaaaaagatttccagccgggcgcagtggctcacacttgcaattccaacactttgggaggccaaggcaggtgaattgtttgagcccaagagtttgagatcagcctaggcaacatagcaagactccgtctctacaaaaaatacaaaaattagccatgtgtggtggcacacatctgcagtcccagagactcaaactacaagtgggaggatcgcttaaacctggaagtgggaagctgcagtgagccgtgatcatgccactgcactccagcctgggcaacagagtgaaacgctgtctcaaaacacaaaaaaaattatttccttctcaagccttccaaatacctggtcttagcgcctttaatatacaacgaatgcttacaaatacaacagaaaaagatgagtaacctaatacaatggataaatgatttggataatatattcagacaattctcaaaagaagtatgcaaatagccaagatgtcagcctcaatcgtaatgaaagaaaataaatcaaatggagttgtagttttcatcttgtggcatcttttaaagcttgataaaagctactgctgataagaaatggaaataacaggcctctcacctcatgtcaatgtgcctgggcacaagcagaagcttctggaagggcaatttggcttcatccatcaaaatgttagggcaggtgtgagggctcatgcctgtcatcccagcactttgggaggctgaggcaggaggatcgccagaggccaggagttggagaccagcctgggcaacaaagtgaagcccatctctacaaaaatgaaaaaggaaaaattagatgtggtggcgcatgcctgtagttccagctacacaggaggctgaggtcagagaatcgcttgaacctgggaggtagaggttgcagtgaggtatgactgcaccactgcaatccagcctgggcaacagagcaaaactctgacaaagaaagagagagggagagagggagagagggagagagggaaagagggaaggagtgagggagggagggagggagggaggcaaggaaggaaggaaggaaggaaggaaaagatatattgagctatttctttaagagctgtactctttactatatgtaagttatatctcaattttgtaaactttttttaaccatgagcatatgttacatttatatatagggaaaacacaatatatttttaaaaattaaaaagacaggctataaatatatttttatcatgacactgtatatcttagagagaaaacaatatataaaatatatttaaatatacataaatgtttaaaacataaaatatgaatattttaccaagagcatatattacttttatacacatggaaaacacagtatagaaggaagacacaagaccagatccgggaatggtgaatctcctccccccaggcaaactggtccttctcacttgggcctgaggaggactccacacccctccccagcccatacctctcagtctcaccacccccttcctggcacttggccaccagcttcagggctggagacatttctttctttctttttttttttttaagatggagtctcgctcttgttgcccaggctggggtacaatgacgtaatctcagctcgctgcaacctccgcctccagggttcaagcgattctcctgactcagcctcccgagtagctgggattacaggtgcgtgccaccacgtccagctaatttttgtatttttagtagagacggggtttcaccatgttggccaggttggtcttgaactcctgaccttaggtgatccacccacctcagcctcccaaagtgctgggattacaggcatgagccaccacacccagtcagggctgaagacatttctaaatgcttgcacttgagaaatggtgagctcaaaaggaactcctgcttgcctggctgaaggccttgtccaggagcaggccttgtcctggctgtaactgcgtctgggttcacacagctttgcattgacaaagacgggagaaaggggctctggggagccctgggcagcttccagtagtcaggggaggtttcctgccacgactacagtggggcgaccgagggcagagggcaagttcaggcaagccttgaagagacccagctgtgtcagcacaaaacgcaaccgtctttccagctgttgacctcatagctgccaagtcagtgcccaaggggctggagacaacagggcacccacagctgtgctccggggcggacacctcagccccccaggcagcagtgtggataacccacgtggcctggatgtggtgggtaaagtgctggcatgcacctttgttcgggtggactttgggtcttgttggtcagatggtcgtggctccgctgctttgatccagggagaaacaggaaagcagaagagacactcactccagcaggtaacctccgccaggccggccccactctattcccagggcgctcctgggcccctgctgctgtccagaggtggtggtttttcttccttaagtgaaaccaccagtgtctccggacttgagaacaagcaccagaaaggtgaggaccacctggcactttgttatccagtcgcacgtttcagctggaggccagcccgccgacataacccttggagggccaggccaggagcatctcctccttttcaaagaaggggaagccgagatgtgggcaggcttgtccccacccaaggcagctgagaaagccgagagctcctctctccattctcactctccaaacatccatggccaacccagacagagcccccaggctctacagaaacctggacaccagagggacagacaggacaggagaggggtgacagtgtggtagaaaaattacgtggtcattggccaggcgcagtggctcacgcctataatcccaaccacttgggaggcccaggtgggagaatggctctaggccagaggttcaagacaggcctgggcaacatagtgacaccctgtgtctaccaaaataataattaataataataataataataataattagcctgtaggccaggcacggtggctcacgcctataatcccagcactttgggaggccaaggcgggcagatcacttgaggtcaggaattcgagaccagcctggccaacatggtgaaactctgtctctactaaaaaaataaatacaaaagttagccaagcgtggtggtatgtgtctgtaatccctactcaggaggctgaggcaggagaatcaatcacttgaacctgtaggcggaggttgcagtgcactgagattgcgccactgcactgcagcctgagtgacagagcgagaccctgtctcaaaaacaaaacaaaacaaaaacaaacaaaaagcctgtagtcccagctactagggaaactgaggcaggaagatcacttgagcccaggactttgaggttgcagggaactatgatcgccactgcactgcaacctgggtgacagagcaagactccatctcttaaaaaaaaatattgactgggcacagtggctcacacctgtaatcctagcactatgggaggccaaggtgagtgggattgcctgagctcaggaattcaagaccagcctgggcaacacggtgaaaccccgtctctactaaaaatacaaaaattaaccaggcgtggtggcacacgcctgtaatcccagctactcgggaggctgaggcaggagaattgcttgaacctgggaggcggaggttgcagtgagccgagatcgtgccactgcactccatcctgggtgacagagcaagactccatctcaaaaaaaaaaaaaaaaaacaacttaatgtatgtctacaaggcaacaagtcctttgatatatagcaatgtaataacgttgtcacacagctgccaaccaagcaccggtccctgccaggctccactccctctggagttctctttgtcctgatagttttcccacgtggaatcttctactccaacccctcccaactcaacggcaaattctgaatctaaatccagagtgccagcctctggaagctctggcctcgtccccacccccaagcacttgttcaccccatttccattgcttgctgccagccgctggcctggcctctccccagaggctccgaggatgcccagcagaaaagccctggctctgggcaggttttcgcagacaagactcgcacctcctcttggactcacgtccccaccctccagggacccataagagagaaaccggtggcacagatggcagtgcacggctcccaaagggaccgagttggcaacagcaggcagtgcctggccaaccccattgcactccacgtggggcatccgctgggaggccagggtcaggtgggccccaacattcagaatgacagacagaagtaggaaaacgaggaagcaggccagtgcccatgcggggagatcagtcttattcacatttttcaagagataacagaaatctgaacttttaggtaaaacatcccgtttcttacatttcagttccaataagaaagcacacgtgccgattagggaaatgcaaatcaaaaccaccatgagatgctgcttcacaccgactagggtggctagaatcaaaaaagcagaaaatcgcaaatgttgtcgaggatgtggagcaattgggcccctcgtgcagtgctggtgagaagagaaaacggtggagatggtttgggagttcctaaaaagcatagaattcccataggcaccagcaatcccactcctgggtatacaccaacaaaaactcgcacacaagtgctcctagcagcattattcataagaactgagctcaaaagtggaaacaacatcagttgtccactggaagatgaatggatacacgcaacgtgtccacatgcaatacaggcgtggtggctcacgcctataatcccagcactttgggaggccgaggcaggtggattttgtattcagccataaaaaagctgaagtaccgatgcaggccactgcctatgtgcacacggaaaacatcgtgctcagtgcaaaaggccagtcaccacaggccacatactggctggccacagtggctcagggccgggaatcccagcactttgggaggccaaggtgggaagatctcttgagctcagcaatttgagaccagcctggcctacatagggagatctcatctctacacaaaataaaaataaaaaattttaaaaaggccacatgagattccgtttatatgaaatgtccagaacaggcgaatctgccgagacagaaagcagattgagggttgcgaggaacagggggaagggagagaaagtatgggagtttcttttggggatggtggaaatgttctaaaatggattgtgacaatggttgcacaagcttatgaagatactaaaaatcattgaattttacactgtaaaatggtgagctttatgttcgtggattatattccaaacagacagtgcaagcggagccaaggatatctatgggccagattgcaccggggggcagtacagctccccctcaaccctgagcctgagcgccgacccccagcactcagtctcactgtgggctggaatcacttttttcttattccttctctaagacaaaaatgtgcagtagaattccccaatgaatactgtgccaccgacacccactgctgctggtgatggcagtagccggcctctggggaaagcaaggtggcacctacaacactgggccccatggaaccacgggggccttatgcgagggaggcaggagcttcagggtcagagcagagatcaacggaacatgattgctggctctgaaggtgaaagaaggggccgccacgagcgaagcaatgtggacctccttaaagaactgggaaaggcagggaaacagatgtcccttggagcctccagagagaaccaactcggtcagcacctcggcttcatcctcatgagacctgggtcagacttctgacctctaaaagtgtgagaaaatacatttgtcttgctttcttttttttttttttttttttttttttttgagactgagtcttgctctgtcacccaggctagagtacagtggcacaatctcggctcactgcaacctctgcctcccgattcaagcgattctcctgcctcagcttcctgagcagctgggactacaggtgcgcaccaccacacctggctaatttttgtatttttagtggagacagggtttcaccatgttggtcaggctggtctcaaactcctgatctcgtgatccacctgcctcggcctcctaaagtactgggattacaggcgtgagccaccgcatccagccttggattgttttaagtcactaactttatggtcatttgttccagcagcaacaggaaactaatacagcaggtgatttaatctccttaagacttcattgctaggccaggcgcaggggctcctgtccagaatcccaacactttgggaggccaacacgggaggattggttgagcccaggagtttgagaccagctgggaaacatggagaaaccctgtctctataaaaaaaaaatatatatatatatatacaaaaaattagctgggcatggtggcacacgcctgtagtcccagctactaggaaggctgaggtgggaggactgccttgcttaagccttgagggagagaggttgcagtgagccaagattgtgccactgcactccagcctgggtgacagccacactctgtctcaaaaacaaaaggacttcatttctaaaattattatttaataattttacctgcttaccaatggaaggcaaagagtaaatgatatcatctttgtaaagtggctgtcccagtccttggcacataaatgctcagtcatgacgagtatccaatgacaattgcacaagcaggaaaaattatgtttacaaggaagtatacttatatgaggacatgctcctagtgtgctgatgccgatggaagaaattataaagattgtatacatatatcgcctatgtaaaaatgcaaaaagaacaattatataagatattaatatcgccttttttctgggtgatctttattctatctaaattttcgtgtattatctatggaatgttttactttttactttttttgttgctgttattaagagacagggagggccaggctcagtagctcacgcctgtaatcccagcgcactttgggaggccaaggtgagcggatcacaaggtcaggagatggagaccatcctggctaacacagtgaaacccagtctctactaaaaatacaaaaaattagctgggtgtggtggcgggtgcctgtagtcccaagctactggagaggctgaggcagaagaatggcatgaatccgggaggcggaggttgcagtgagccgagatcacaccactgcactccagcctgggcgacagagcgagattctgtctcagaagaaaaaaaaaacaaacccaaaaattagctgggcatggaggcaggcgcctgtaatcccaactactgggtaggctgaggcaggagaatcacttgaactcacaaggcagaggttgcaatgagctgagatcacaccattgcactctagcctgggcaacagagcgaaactctgtctcaaaaagtaaaaaataaattaaaaataaaaaaagatattatctttggtgaactacctgaagtcttttgcccacttaaaaaaaaaaaagaaaaagaaaaaacatggaattctgtgtcgttttttttttttttaatttgtaagagtcctttgtatattctacatacaagttctttgtattacaagtattttctcccagtctgaggcttcctggctcatgttcttgtaacggtatcatttgatgagtgcaagttttaaaatctgacaaagtctaatttgtccattttttgaaaataactcttgctttttagaaaccaacagacctttgccagcctaaaagttgcaggtattcttttgtatttactgcttttttattttttaatttaattttttttttttttttgagacagccttgctctgtcgcccaggctggagtgcagcagcacattctcggctcactgcaacctctgcctcccgggtctgagcaattcttgagcctcagcccctcaagtagctgggattacaggcatgcaccaccacgccctgctaatttttgtatttttagtagagatggcctttcaccatgttggccaggctggtctcaaactcctggcctcaagtgatctgcctacctcatccccacaaagtgctgggattacaggcatcagccacagtacctggccatttattttattttattttatttttatattttagggacagggtcttgctcagtcgtccaggctggaatgcagtaagtagtgcaatcgtggctcactgcagcctcaaactcctagactcctgggctcaagcatcttcctgccttagcctaccaagtagcaggtactactacagctggttgcaccaccccagccagctaacttttgtttttgttttgagacggagtctcactctgtcacccaggctggagtgcagtggcatgatctcagctcactgcaattttcacctccggggttcaagtgattctcctgcctcagcctcccgagtagctgagattacaggcacgcaccactatatccagctaatcttttatatttttggtagagacggggtttcaccatgttggccaggctggtctagaactcctgacctcaagtgatctgcctgcctcagcctcccaaagtgctgggattacaggtgtgagccaccatgcctgacccacaaccagctagctttttaaaaaaaactttttattgtctaggctggtttcaaacccctggcttcaagcaattctcccatttcaacccgtatttacttctagaaactttattatcttcacttttgtgtttaggtctgagccaactcacattaatttccaggtgtcatgtgaattggggccatgggtcttttatttttatgtgtatggatgacacagctgtccaacatcatgtgttgaaaagtcttctgtccccgatgattttcttttgtcagaaataaaataaccatgtatgcctgtgggcccatttctggactttctttgctgttccatgaatagtatttgtctattctacaccaagtcacagtgcactgactatgtaattttatagttaagtcttgaaataaggtcatgtgagtcctccaacccagttctttttcgagattgtttgggtaattccaggttctttgcatttccctgtatattttataattcacttatccattactttcttgccttttagatgctgagattttgattaggattgtgttcaatctttagatcaatttagggggaactgatatcttttttttttttttttgagacagaatctcgctctgtcacccaggctggagtgcagtggcgcgatctcagctcactgcaagctccgcctcccaggttcacgccattctcctgcctcagcctcccgagtagctgggactacaggtgcccgccaccacacctggctaattttttgtatttttagtagagacagagtttcaccgtgttagccaggatggtcttgatctcctgacctcgtgatccgcccgcctcagcctcccaaagtgctgggattacaggcatgagccaccgcgcccagccatattagtccattttcatactgctatgaagagatacctgagacagggtaatttataaaggagagaggtttaatgaactcacagttccacctagctggggaggcctcacaatcacggtggaaggtgaaggaggagcaaagtcacgtcttacatggcagcaggcagagcgtgtgtgtaggggaactcccctttataaaaacgtcaaatcccgtgagatttattcatgatcacaagaacagaatgggaaaaccccacccccatgattcaattacctcccaccgggtccctcccacggcacgtggagattatgggagctacaattcaagatgagatttggccacgccatatcaatattctaagggctggtttgcctgatgatggtcctcagaggtgatttaaggatctcttgtggctacagggaaggaaaaatggttccatggagtcatacacacggactcagcacagggcctggcacacagtgggcaccaacaaatgtaagccatgtagcgcagcacaaagcagggaggaggtggggacggatcaagtgctatgggacagactgtgtcccccgcaaatccatatgttgaggccctaactcccagcagctcagaaagtgactgcatttggagagaggaactttaacaaggtaattaaattaaaataaggccattgtggtggccctaacccaacaggacgggtttccttatgagaagtggagatgagggccggacgtggtggctcgcacttgtaatcccagcactttgggaggccaaagcgggtggatcacctgaggtcaggagatcgagaccatcctggccaatatggttaaaccctgtctttacgggtgtagtggcgcatgcctgtaatcccagctgctcgggaggctgaggcaggagaatcacttgaacccgggaggtggagtttgcagtgagccaagatcgcaccactgcactccagcccgggcaaccaagcaagactctgtcttaaaaaaaagaagaggatggccgggcgtgatggctcacgcctgtaatcccagcactttgggaggccgaggcaggtggatcataagatcaggagatcgagaccatcctagctaacacagtgaaaccccatctctactaaaaacatacaaaaaaaattagccgggcatggtggcgggcgcctctagccccagctacttgggaggctgaggcaggagaatggtgtgaacccggcaggcaaagcttgcagtgagcggagatcgcaccactgcactccagcctgggtgacaaagcgagactccatctcaaaaaaaaaaaaaaaaaaaagaagagataagatgaggacacagatgtgcacagagggacaaccctatgaggacgcagggagaagacaccgtctacagccaaggagagaagaaaccaaccctgcccacatcttgatctaaaacttccagcctccagaactgtgagaaaattaacttctgggagcccctagaagggctcccagggcatggaactttgttgtggcagccggaggaaatacacgacgggaatagccagtgccccatcctgcaagtctaggaaattaagaatcttccactcatttaacacaatccaagcagtgctaggctcagtggctgctaaactgttttctgatcttgccctctggagagggtacaaatgacccccaaagtggccacaaattcttccagatcctgtatggtcactcatttgctactcctctggtcaagaggttggagtttacctcacatggcttccatgcaacttgctgtggcccctgggacgtcagcaaacatgggaccccagcttccattggaaccaccgaagaaaggatccacgctggcctgctgcagacagacagccccgccaacaaccagcaccaagcaccagccacgcaagaaaggccatcccaggccatccagccccagccaagccgaagccatgtgagtgacgccggcatgaccagcaggagcactgaggagctgagcccaaggatgatccgtcaggctaaggtgttctccccggctaggccacagcccccaggtactcaggcaaacgcaaatccagtcgctgctgtgacttgaggtgaaggagcttaccccgaataatctgggtgggtctgatcaattcattgaaaagaagcaactccgcctgtggaccgcagcgccagctcctgtctgagtcgccccggctgcctctgaggaaggcttgctctgcagtttgggactcgcctcaccagaccccaccatcacatcagccagtgccttcagtaaatctctttgaatgctgatatttctatctattggctgtttctctggagcaccccgtggtctaggttgggctgggggttctgctagtacttttgtcattccctttgctttcctgtggctggagactgtgctttgtcatcgttgctggcccagttcctgcccgcccttctcctccagggcatcctacaaatgtcctgtgccaccacctctcatagcgctgccaggagcagtgtgagaaggactcatgaccacgcctcaatcctgaattcccctcgcccgttcctctctggatgcaatctcactactttgtcttacttcccctgcttcagagggctgagattcgccatcctggggggcacatgtccccataagcagcattcacacaggacaggggcctctaaaggcagtgaccgcaggatgcaacttgtactgaacccaaagaaatatgaatgtgaggccgggcacagtggctcatgcctgtagtcccagcactttgggaggccgaggtgggaggatcacttgaggtcaggagtttgagagcagcctggccaacgtggtgaaactccattactaaaaatataaaaattagctgggcgtggtggtgtacgcttgtaatcccagctactcgggaggctgaggcaggagaatcacttgaacccaggaggcagaggttgcagtgagctgagctagcaccactgcactccagcctgggcgaccgagctagactccatctcaaaaaaaaaaaaaaaaaaagaaaagaaaaagaaatatggggagggatagctttaggagatatacctaatgctaaatgacgagttaatgggtgcagcacaccagcatggcacatgtatacatatgtaactaacctgcacattgtgcacatgtaccctaaaacttaaagtataataataataataaaaaaaaaagaaatatgaatgtgaggtcagtggcagcctttcctgctgatgcagcagggacatggaaagtacaaggtttcagcttcaaggaggaatatcctataaacgtgcctcaaaagacagtagccatccctgccagcatcaggagcccattctttccaaatacacagagtccagcgaggacacgccaggccataggagctgaggctgccaaaaacgcttctgtgccttgtgagttaaattaacatcatttcggtgcacagtggctcacacctgcaaccccagccctctgggaggtgaaggcaggaggatctcttgagcccgggagttcaagaccagcctgggcaacacagtaagacccccaatttctataaaaataaaaatagtagccaggtctcgtggcacacctcttgtaaccccagctaccttggagactgaggcaagaggatcacatgagtccaggaggtcaaggctgtggtgagctatgatcacactactgcactccaacctgggcaacagagcaagatcctgtctccaaaaaaaaaaaaaaattagcatcatggctgggtgcagtgactcacgcctgtaatcccagcactttgagaggccaaggcgggtggatcatctgagctcaggagttcgggaccagcctggccaacatggcaagaccccgtctgtactaaaaaatataaaaattagccaggcatggtggcgcgtgcctgtaatcccagatattcgggaggctgaggcagaagaatcactggaacctgggaggtggaggttgcagtgagcaaagatcgtgccacggcactccagcctgggcaatacagcatttctatagagaaactttttttttttaataaatgctactcacggcagcagaagctaaacactggaaacaactcaccatctatcagccatggtctggtaaataaacaataaactatgcagcatcccaccccagaataccgcggagaggttcagcaaagaaagcaaggctctccattggatggagagtgaccttctggccatactgctaagaaaaaaggcctggcatggctgggtgtggtggctcacacctataatcccagcactttgggaggcggagacaggtggatcacctgaggtcgggagttcgaggccaggctgagcaacatggagaaaccctgtctctactaaaaatacaaaattagccgggtgtggcggtgcatgcctgtaatctgagctattcgggaggttgaagcaggagaatcgcttgaacccagaaggcggaggttgcaattagccgagatcgcgccattgcactccagcctgggcgacaagagtgaaaaccctgctcaaaaaaaaaaaaaaggcccggcacagtgcagcctgtggtggcgtgccaccgtgcctgtgatagaaagaaacgagcaggagggcagctatgagaaatgttctgaggccccttgctaggacaggcacacctctggaggagacagcgtttgctgcctgcagagtggggaactaggttgctggggacagggaaggaggaaggcttttcagtatatatcctcctgaaccttttttattgttgttgtttatttatttttttctgagacagagtctcgctctgtcgcccaggctggggtgcagtgacatgatctcggctcactgcaacctccgcctcccggttcaaacaattctctgcctcagcctcctgagtatctgggataacaggcacccgccaccacaccagctagtttttgtattttttagtagagatggggtttcaccatcctggccaggctggtcttgaactcccgacctcatgatccacctgcctcggcctcccaaagtgccgggattacaggcgtgagccactgcacccagccctcctgaacgtttttatttcatcacctgggcgtaccccactctcctggctgagttgacagccaccaaggtggatggtggtggaggaggcacagcctgactggtgaggtgccgccctgccccggtgggagcccagcctcagaccctcactcacctggggaacctggacacgctctgggctgccctcttctcacctataaaacaggatttcccagtcccttcttctaaacttccctgactccaattgcagttcttctattactgagagttttgccaacaacagtgagagaaagggtcttttttttttttaataggaatttcttggacagatctttacactttcccaccaaaaagcaacaggatctctctctcttttgtgtgtacatcaaacaacatttctgtgtttgggttctttcaaacaagaagtaactcatctgaggaagggagtgaaatagaacaagcattcgatttagaggggatcttgcaatgcagttctccaatctttaaacccacgggttgttcccaaaggatttatagaggatgctgaggccaccagcaggagagaggaacaacggttaacacactcaggaactgtgcgcttgttctcatcacttagaatccctgaactatttgtttgtaagtaagggtttcactcctagattttagacctttgaaagtgtatggttttgtttgtttggtttggttttttttgttttgttttgctttgttttgctttttgagatggagtctcgctctgtcgcccagactggagtgcagtggtgccatctcgtctcactgcaacctccgcctcctgggttcaagcaattctctgcttcagcctcccgagtagctgggattacaggcacgcgccaccactcccggctaatttttgtatttttagtagagatcgggtttcaccatcttagccaggctggtcttgaactcccaaccttgtgatccacctgcctcggcctcccaaagtgctgggatgacaggcgtaagtcactgcacctggcctgttattttttaaattgtgaaaatactgcatttcacactggaaaattacgctcataaaaccgttttgcactgtaaaaattctgcacccgggaaaggtcctggaaaaagccgaggtggcatgcgcgcggaactgccggaccagctgagcatcaggttgctcagacatcactggatcacttgcacttactagagttactgagaagtggggacagaggcaaccccatctacccgggctgtgactgtgaattggtgcagaccctcggagggcagtttgacaatagctaactcagaaaggtagagccatgtatcttcttttgttcctttctcccatagagaagacatacccttttaagacagctctgtgcatgctattctgtagatacgctggtactttgcacatgggaagacaaagatggtcattgctgcactgttttaatagtaagaaactggaatcagggaccgatctgattgcaaaattaataaatgacactctttaaaataaaagcttcatgtaatggagacctcctgcaaggggactgtcatcataaatgagctcattgtccatttcccacctcctataactgtgttccttaaccaccccctgcctccaggatcggggcggggaaggggggtgcctccagcctgagcctgtctttaggtgtgctgcaatgagctaggtggcctggtgggtgagggtgagtggagtccgagaaacatacggggttgctccagcctttgaccttggaaggcctcctgagagcaggctctccaccacttccagaacagcctgcccatttgcccctcccaggccaacatgggaaacagcaggcccaggctccacggtcctgtacctgatacagtttgtattctcctgcctcatgtgcacagcgagggattgggcaggctgccctttgtaagaagtgttctaaacgctgagagccctgggctgcctctggcttgtcctgggtcagaatccaggggcggacatgtgcatcgtgtgcccaggggtccttaggcaaactgaaagcttgagggatcctgcaagtgcctgaactgtgcttatttttacttgagttctgatacacaaacacggtctgtcccgcatatgtaatattcacatattacatacacagaaacggcgtgacattaacacagctagcctgtaagtcacaccttagtcttgcaaatgtgcagaggagctgggggcaaattacgacatgagatattaaatgtgatgtaaatgtgtgatgtattctaaatcctgagtgtatcccatgcagaccggctggtggtggtgtctggttcctccttttagccaacaccgctgatggcagtagggagacagtgcttttagaaaatctaagagctgtttgaaagtatttggttaagaagtaactactgttacctagttacagctgccaaatccagggtcactggattgatctcaattcctgacttttccattgacttcagagtgagacattctttgctttggcatctgtaattttcgatccacaagcatagcgtgaaaatacttatgctttcttagtagcatttcagacacgaataagttaatacttgtccttatcacttgcgtagaaaggaaatcagtactatacaaagtctgtactccctgaatgtcttcctctgtgcctggatttttaatatcttttttgtatgtgttttaaacattcttgtatataattaagcataactgtgagtgtaggtaaactattcatattccaggattaatttatgtaaccgtattactttcatttaaaatatgtttaaagcagatccctctcattcctgtggacctgcaaagtgtccagtacagtgaccaccagctacatgtggctactcccactgaaatgaattaaagtgaaatacaatttaaaattcgagccttcagtggcactagccacactgccagtgctcagcagtcccaggtgcctaacggccaccacactggacgcagtggagggaggctctgtccatccacttccatcacccacagatggagctgctgctacggtcttatactactggatatctagtagtgcccacatgatagtacatactaactatctgtcgaatgaataatacaataattagttttaacttgtcttaataattcttaaaatgtgacagtcaaaacggaagacgtccgcttgttttacacagttggattagctgggggttattcttcccttctgcctattcccagctttgtttttagggaacgtgccacagattttggatcacacgttcacagaatgtatctgattatttcattctggccaaatctgtcatatttgtttctccaaatgaattatctaaatattattttacccaaactgtttgcagttgggtagatgatgtacatgttaaaccttcctggacgctgatttatttttttcaatgtgttagtatcaaattctagcaaatttatttcttaagcaaagaaatcattcccttttcaaagccttcttttctttaaaaagaaatcaagcaagtatcccagcataccatgagtcaaagaggaaactggaaacttccagggcaaaatcttagacccaagatgaattctgcaaggaaacgtgatgtgaaactgatccagctatttgtaggattacaataaatacacctttgccctcaactccacaatttactgccaagctgcacaagacagggatacaaaaggagccggcggagacactgttagcggatcccttcactccagaggccagttttatcccaacacaaggattctttactgcctctgcccctgagtaaacaaacaccttccccccaaggacatttccctttctcctgccctctttgcaaacaacatctgaatttgcacgtactctccaggaaatcaaatgaatgtaacctatctaaccaaagaaactgaagaacacgccataaattgaaagatcggttcctacagttcagtattttctccagtaggcctttctgtaaaaacaaaaaaacacatttctcctgcagaaccctttataaatatggttttgatgatcacaattacattgagacagtctcctacaacaagaaacgacttttggatctgctcaacagaaagagaattttgcagctgtgttcaaggaagcaagaaaagcagagagtgaattttcatggagttagactgcgttgagacgaatgaagctaaggctcaggtctctttcattacgtgtttgacttgtcctgattcaaaatctaaataacttaaagggtgattcttcatggaattcgaatcttaacaccggaataaaagggtagcctgctgacgacgatcacagggaggacaaggggtcacccccactttcataacatggcctgacccttttctgccgcggacaattgatccgaaggacgccggctgcccagccctggcgggccactactgacctagtccgaagttaggaacagccttgcaaaccgccccctccccctccatttcatcaaaatcggggaacaaattcagaaaaggtgcagctggttttctccctacacgtgccctaaaactcgggggctggatccacttttcatagctgtttaataagaactccgggcagttcgtattacttctttctcagagtgcttggtggtttaagttaaagcattttcctctctcgcctttgggggaaaaagcctcggctgctggggtttgtgggcccctcccccggacttcgtcttcctttccttccccagcccccgacccgttttgctctcgtccaaaacagagcgactcccccgctgccgaggaaaagccagttcaagaagccgggggaagggtggggccccgcgtgccccggagcagcgcccctcgaaggcgggggcaggaagcagccgccgcgccccgtcccgcttccctcccttcgggccagaacaatggctttttgcccggaaaacggagttgggagcaagggcgggcgcgccccgggaatcacgcgggactcggtgggcgccccaggcccgaagtccctaggcacctcctcccccagccaggggcccgcccgcgcccccacccccgcccccgcccccgcccggggccccgcgcgggaccccccgccggagcgcgaggcccagcccgccgcggacaatgcgcgccccgccccgccccgcacccgccccccctcgctgattggcccgcacgggatttgggcagcgcgcgggggcgggcggcgggccggggcgcgggcgcggagcggcggtgcgcgtgcgcggggcgggccggcgccgggcgggggcggtgctttgtgtgctgccggcggggcgcgcggcggtccgggcgggtgactggcggcgggcgccgcggtcgggctggctgccgggcagcatggaggagctgagcagcgtgggcgagcaggtcttcgccgccgagtgcatcctgagcaagcggctccgcaaggtgcgtgcggcccgccgggccccccgcccgccgcccgctgtccgtctggctcacggcccctcttctctccccgcagggcaagctggagtacctggtcaagtggcgcggctggtcctccaagtgagtcccccgcgacgccgcgcccccctcccgccccctcgcccgggggtggggacgtggagcccctcggccgcgccgtccggtggcctgggggcgcccgcgggcagagcgggaagttcgcggggtccccgcgggctcctccggctctgaggggggcgggggccgcccggcccgaggttgccctttgtttacacgcccgcgggtgcagagctgggcggccccccgcgccagaacctcctcggctgccgcgccgcgctccccccaacccccgtcccggccgggagggaggcgcgggatgcaagcccccctcctcttggccagattctccccgctgtaacctgagcttgctattgatggatgtagagtttctttttttttttctttcttttaatggaagggagggtgtttggcatccccggaaggggctctctgcacagctgctcccgcggccccgtttctgcgtcttcccggaccccgctctttcttcgctacccctcgaggtgccccggcccgcgcgccacattgttctggatctcgggctgggcgcctgtgcccctccctgcatgctggacctgccttcccttcctcctctggctccgggccagggtttgggggaatccctctctgcaactttgcgttttatgggggtttgtttttctcccaggcagagactgtgggagtcctcttgtggccttgttttaattggggggttggagcggcagtttccctttgggtctgaggttagagtgctggcttggtggggggtggccagcctccaaaacctgggtttggactttgagaagtgccatggtgctacggtgccactgccatcggcccaagtcgaggagcggtgagggcgagccccctcgggctgccttgcaaagcggtgatcatcagcctggcgtctaatgctgccctgtcctctgctttgcagacataacagctgggagccggaggagaacatcctggacccgaggctgctcctggccttccagaagaagtgaggacgctgacagcactggggagggtgtgggggagggacggtggctggttggagtcgtgctgggcgctgctcgcctgccgggaggctggagctggggctgtggtctgaggtcccttagcaagattgtgtccagggccatctctgtggctggctgtaaaagtccccagccagcccctctcccaccttctcctagccagcctgtatccatccctgagaagaacctaagtaagtgctgctttggtgtttccgacagccatacttgcaaaaaccaactttttcagttgcttcagataaagatgttatagcttctcttggccttttctgctgagtaatttgcacatggcgctaacagaaaaccaggagagcaggtttgccacagtgacgcaggtctgcccttccagccctgcacgcgtgtgccatcaggcaagaaggctcagagagggagctggaacacacagcacgcagttgtgcctattgtgatgtctctctcaagaaagaaacatttattttgctctggcctgcagcatacagtaccaagtagcaccatgaggccggattgggccagacttgtttctgtaattctagatgtcatttctatttttaggtaggaagtttaggttaagagataggcctccttgagatgttcaagggcaaggggtggtgaggagagggcagtggatgtgcccacctggcatgaagggccagggagtactgttcaagcaatggcaagatggggggtggtttcactgacggctccccctggatcccctggctggacttgccctgtggatagaggcagaagaattggttgctggagtctttcccagccagggtcaatctggacggtttgttctctggtagcaaaaggtgcattcccttttttccactgtagcgggacatattgggtcttcccagaggggtcatgataatggggaaatagagttttctggtggggcgagcaaaaagaagagcctgtgcttgcttaaatccctttggaaaatcgtaacagcaacccatcgtcttctgttagttcctgtctgggtgctgtgagccttggggtgggggaatggcttggcccacttcagaggctggtgcgcttctctggatctaagacggtgtcctaactgttgagagagattgtggttttggttagagcagaaacacctgagataagaagagtgtaaaacccatgggtggcttggatgacatcgtggaagaaagaaaacagagaaggtgggacagccttctccatccaccaaaatgttagctctctctgggcactaggagctggcggttacctgcttggtattggagggggtgggggtatggcccttggcgacgcacaggatcacagcagtcagtgcacaggttaatatttcagcggaggagatccatgcaacacttcattgtccttttaggagatttcaggttaaggaccagcacttaagagtatgaactttgcctggtactaatcagaactgtgttgaggaggttgccttccaggccccaatgagatgatgtttgcccagataattaccagggccccttttctgaaatacaggctttccctgggggctggaggttctgctagcacttcatgaccctggaggtgtggaggctcttctgggggcggggggggtactgcgagtggtgcgtgcattgagccttgcctgcctcagacctcggcacctctgtcatctccctcaagagtagagtttaggaacagagaggtatttttaaaaaggaaacaaggagagtcatgtgccagcagccaggctctgcgagggctggaggacagggcccacggtgctccttgcccgggtgagggttttatgcaccagaagctgcccaggggattggtggcatctccttgtcctgggcttccttctcctattgaaagtaaggaggttggaccgtgtggccaccgaggccacttctggttagaatatgctagaatttccatgcagcagtgcacctgcaggaagctgtcttaagtcagagaatactggggcgtcattgttttcccagcgttgctttcctgtcttcagcttgtccttagccaaatgaaatgggatggctggttactgaccctagtgcaaagaatggggtctgatctctgccttgggtatttgatgatgtgtttgcggcaaacaggataagctattacaggccaacaggaatagggtgctggaagccatagagtcccacatggtagaaggggtacgcacagggcttctcccccattaactagtggtgtgccttcagggaacatgagaaggaggtgcagaaccggaagagaggcaagaggccgagaggccggccaaggaagctcactgccatgtcctcctgcagccggcgctccaagctcaaggtgggtggctgcgctgggtatgctgaccccacctcccagcacccccttggcgtagggggcaggcagagggagggtttggggccctcaggaagggggtggcacttctgccaacagtctgtccctctactcggaaaacaggagccccctttcttcctgtctctcagcttctgctgccaggggccccagccggctgagagttcctccccgcccctcccaggggcttcctgcttcagcctgtcctgcacgcctctctgctgggtggcagggtcaaactgctgcagacaagcactcttccctcccagggggtccttgggggacggaaaggaacaggaagcatgcgtacagtaggtgctcataggattgccggctggatgtgactcaaaagcctaagatttgggggctactccgggcccacctgcgggtgcaccttaaatcgaggtggccacgaaaggcagggctgactgaatagccagggggtgccaggaggggccttggaggagggcagaggcagtgtgggctgatgatgtgctttggccttctcgggactgtcctgtcacccctcctcgctacagtgatgggctcaccccgccacaggtatgcatgcgcccctggggtccgtggtagggcccctccctcccctgaggacaggtgaggcaggacaggatgggggaggagggcctggcctcagtcccgggtgtggctttgattccctcctccgggcactgtccctggaccttcgcgtgttgtggccacgagctcagtcactaactgaacctgcctttccaggaggatttcctgaatgaacaggattccctgctgtagaatcttgttggctggtctacactggccttacgttatcttgaaaatcttccttttgagcaggattgtgggggctgcaggagttctgctgactgaggagtggccacaaggcagtgattgatgccttgtttgaggaggtttgaggagatcactcctgttgaagttgggagaacggggtggtagggaggcggtgttggatctgactcctaaagcacacgctgtagaattctgacccagcaggcagcatggcggcctgtaaaacacaaggacactcttatttaacattggcggtgacatccagaaggcgaggaagacagtggtttatttacctgtatcctggaaggctcagactgggaaatggggatactgaagcccacttggtgtaggctgcaaagctgtgcatgctacttaatacgacttgtaacctcctgagtcctgaaaactgtgatgctctggatacagttccctttgaacgtctgctctacagcccggagctaaatctgcatcccccttgaaagctgatggtggacggggatgtcatggtgtggactctgtccgtccttaactctgtcttcatttttacgagccacctatttttctctctatctacctttaattttgcctctcatggaactgtgagcacggtgagaagttgctccttcctgactgcctctctggtctggaagccacaggagttgatggctgcaaggtgcccagtgttccttggggacagcatggcgctctggaccctgggaacaggcagtggaggtgtgacaccttctcctttatctttttttttttttttttgagacgtagtctcgctctgtcgcccaggctggagttcagtggcacaatcttggctcactgcagcctccacctcccgatttgaagcaattctcctgcctcagcctctgcagtagctgggactacaggtgcgcgccacaacacccggctaatttttgtatttttagtagaaacagggctccactatgttggccaggctggtcttgaactcctgacctcaggtgatccacccgcttcggcctcccaaagtgctgggattacaggcgtgagccactgcacccagccaacttctcctttatctttccaggaacccgatgctccctccaaatccaagtccagcagttcctcctcttcctccacgtcatcctcctcttcctcagatgaagaggatgacagtgacttagatgctaagaggggtccccggggccgcgagacccacccagtgccgcagaagaaggcccagatcctggtggccaaacccgagctgaaggatcccatccggaagaagcggggacgaaagcccctgcccccagagcaaaaggcaacccgaagacccgtgagcctggccaaggtgctgaagaccgcccggaaggatctgggggccccggccagcaagctgccccctccactcagcgcccccgttgcaggcctggcagctctgaaggcccacgccaaggaggcctgtggcggccccagtgccatggccaccccagagaacctggccagcctaatgaagggcatggccagtagccccggccggggtggcatcagctggcagagctccatcgtgcactacatgaaccggatgacccagagccaggcccaggctgccagcaggttggcgctgaaggcccaggccaccaacaagtgcggcctcgggctggacctgaaggtgaggacgcagaaaggggagctgggaatgagccctccaggaagcaaaatcccgaaggcccccagcggtggggctgtggagcagaaagtggggaacacagggggccccccgcacacccatggtgccagcagggtgcctgctgggtgcccaggcccccagccagcacccacccaggagctgagcctccaggtcttggacttgcagagtgtcaagaatggcatgcccggggtgggtctccttgcccgccacgccaccgccaccaagggtgtcccggccaccaacccagcccctgggaagggcactgggagtggcctcattggggccagcggggccaccatgcccaccgacacaagcaaaagtgagaagctggcttccagagcagtggcgccacccacccctgccagcaagagggactgtgtcaagggcagtgctacccccagtgggcaggagagccgcacagcccccggagaagcccgcaaggcggccacactgccagagatgagcgcaggtgaggagagtagcagctcggactccgaccccgactccgcctcgccgcccagcactggacagaacccgtcagtgtccgttcagaccagccaggactggaagcccacccgcagcctcatcgagcacgtatttgtcaccgacgtcactgccaacctcatcaccgtcacagtgaaggagtctcccaccagcgtgggcttcttcaacctgaggcattactgaagccccggcgccaccagctgcgcggtcttactccccttccctgcctatggtgtcgcttggctaagtgactcccagcccaagccccctcaagagtctgggtcgggggaggaggagtgggtggcctccttgatgggcaggcttggaagggacttctcccgcaccccactctgtcccaggacatagggcagggggcctcactgccttgttggtctccaccttgttcctacctctgcaggcctctttgctctcccctcttgcctcaggaaacccggtggcacctgtggctccaggtgactgtcttgaacagagcgggcttcttcatggctgcgttgttgctgagtttgaactgctcctccctggcctgcgtgactgaatcacagctttggtccctgtcttgcaggggctgaggtgtcaggaggggacttctggcccaccttgccttcagccctggagtgggcagagagtattgtggggaggcatggccagtgggactagtgttccctccatctggccacagcttttgggagatggggtgggcaggggtggtcctggctggcattgcctgagccggcagtgatgaagtggggagcttgcccttgacaggtgggggctggctggggccttaatgtgaaaagacagtggcaggcagctggagtagagcgagcccagcagccctaaaaggctgccttcatggccatctagccccagttcagggcagcatccatagcccacaagccagcgtgggtggggcgggggtggtcccacagctgggttccacctgaagagcctccgtgcctcggagcaggagaggcaggctatggctgccaccctccctcctgcctgtgtcccagtgagaactgacctgagtccccttccaaacccagacccacctcctgccccaggcccactgaagcatgttccatttctaaaaagcccagagttcagtgtgtcccaaggaaaacccaaagtggaggtgctcaggtccaggggagtccagtgggcaggacccttggcaggcaagcccctcccttcactcccaggacctaccttctgctagtaaaggactggcttcattctaattatggcccacagactgccccggagacctggaggacagcagtgctggcacttgggtgtccatgggcccgtctgccggctctgcctgtgctgcaagtgttggccgtgggtccagccaacaactccctacgtcctgtgtggggccctgcccaagtggatgaggcattccttgaggagtatcattttccctgacaatccccatcacctttaggggttccctgcttggctcctttccagctgaaaaactagacctgtgccattggggaagctggacaaagtctagggggcccgcctggtagagggtcccgggaagctggatctgtcagcctcggccctgaggcccctgttaactcaagactgtgagctgcctctaggtggtcacgtctgggagctagcttgtatggcttctgaccagtatcaggatttctgttctgagagcagcgtgggcagcaaggcagggcagcccagaggtggcagcggcaggcaatctggtcactaggtctttgtgatgccaaaaataaaagagggtggggtgggtgctttctgttcctctgattggatggagtccgccagcaggcatggggctacattccagtgcctgactatagggaggcactcctgattccatggagcagcccggactttgagaatgggctctggtttgcggggggcaggcgtaccagactgcaagaccccccagtacctcaccgtgccaaataggaagaggtggccttggtgtagccaaatggatctttttaacagtgtgcctttggggagggacccatgtccatggcttcgttgagggccatccatatgccagctgggggccagcccacagtggccatattggctgcagcaggaatggtgcccacctcggcgaattgaagggctaagagtcccagatagctaggccagagctggaagcagacagtaaggggaagagctgctcccacaggagagggagagattccagctcactgcgcagcctgggaggaggcgtggatcctggcacgctgagcctcaggcaccagcctccctgtgctcgacagcaaagtcttgactccttcctgctgagcactgtgctaccttcactgctccaaagccagactaacagctctccaagcccttggggtgactcggcttccaggagctgttggagaaatgaggatgtctgtccctgtctgcctgggcaggccagattcctccccagcagccgggtctctccagaccctgattcggtgcctttctgtttaccagctacttcaatcccaaagtttgaatctgcagataccttactcccagccactttgccttcttactgtgttgtgtgtttttcctggtgcttcaagagcgtgtgcagggcaagtgccgtcactgggaactgcaccagatgctcagacttggttgtcttatgtttaccaataaataaaagtagactttttctatttttatttgctgctatttgtgtgtgtgtttgtgtttgtgtagctaggtatctggcacttctgacgatgcattgttgcttttttcccgaaggtcccgcaggaactgtggcaatggtgtgtgtgtgaaatggtgtgttaaccgcgttttgtttgctcctgtattgaataggaagcagtggccagtctgtcttccttagagatgttagcatatttttatatgtatatattttgtaccaaaaaagagtgttccttgttttggttacactcgaaattctgacctagctggagagggctctgggccgagagctttcactaaggggagacttcaggggaggatcaagctttgaaccaaagccaatcactggcttgatttgtgttttttaattaaaaaaaaaatcattcatgtatgccacttctaattgctttcaactatggctgtttgctttcttaaaagagaacaaaagtagatatgttattgccctaggaaaggatctctgttgaaacaggacagcagcctagggcccacatttaattaggatcaaccagtttaaggaaatgcttcccccaaaaagcccctgatggtgtggggaaggggaatggtgagttgggaacaggtagtgcctacatgaccagattttactcaagtgcatctcatgattctgtgggttttctagcatttttggaaaactagcataggttgcagggttttttcttcttttagactgatgttaatttattttgcaggggaaggacagcaaatggcgtcagaagatttttgtccttttgttatctcttagtatatcaataaatttttaaaaaaaaaatttggcctgatgtacatcatgagtgatccctggaaacacagtagactctgctcttttcctttcttgaggcaaaataattcgtctggacataggccaaatacttggggcacagaaaaatcaaagactgggaaaggccacttgcagagggtgcagaaaaagatatgtttccaagcaaaggatgggtgtttaagagtccatataccagtggctcacaacagagaacaactggcattccagggaacacttgcagatctggagatcttgcttgtcacgctgtggggtggatgccacttgcatctagtgggtggataccaggagtgctgctagacgtcctgaggtgcacagaacagtctccatgacagaaagaaatgatccttcccagcacgtcagtagtgctgagtttgagagactgaattaatgggaaaaacagaaaaaacacaatggcaggggttgggggcaggggcggcattatcggcatctgtcaggtgaggtcagggatgctgcaatatataatcaactcattttgagactgctcccttcaaaagacatgcaaagttaaaataaaactccctctccccgcgcccacagtatccagagatgctgtgttggaaagccactcaaccccttgaagccaccacatgtgctaataatgctttacaaggaggcagccataaaattccaggggagtcactgtgagttagcagctactgcaactcctaacccaaagctcgcgaataaagaggcgatttgcttattacagaaccttccccggctccttaaggcttccaccaacttcagcatgaatttattcatgaattccagcctccagggagaatagagcttctttgaagtgaagagagaagctgggcctagatgttggagtaactgggtgaaaagctacttggggccaaggcctgaatgttttggttcaggaaagggttccccctgcaaatggaaatgtgacccccagcactagcccgctccaggaagtcctgcgaattcgaaatcgactgttgcagagaaagaagactgctggtgggctctcttttgctgccttcgcaaggctctggctgtttccttttggagaaagtgggcaagggcgaccccagcgggcctgtcctctggcttatgagagctgcagaaaggggctgggaccgccaggaaggagcaagctggccgagcaggagcaggcgcggccccggatgtggagccaggctttcgggagagcccatttctacagggattcggcccgacgggtgccgggccgagctcgctcggcctttgttagtttcggcgccgctgatgtgatcgcctaatccagtggaccctgagaagaacagactgggctgccaatggcccgaccccacgccgccgcgacctgcccgagggcaccgggagcgatgggtgcggaggggctgggaggacggtcatccgggcggctggacctctccttcctcccctccgccttcgtggctcgagcgccgggcctcagggaggacgcagagggggcgcccgtggcggtgggcgcccagcggtacctttgggtcggggggaggtaaggctttctcagctcgggttcggaaccagaaagccaccggccccccgggggtaaggggtgggcgccggcgacccgggccgacgccgccacctgcagagggcgcgcgcgtcccaccaaggtcggccgccggcccttcggacggacgagggaaaagccagccgcggctccagggtgcccgagactcaatcgcaccacctgcaccccggccacctccgcctccgaagtctcaggaggaaagccccgacccagcccgcagcctctctcgccgcgttcaggacccgaggctgcgggcagccgccttccacgacggacagcacggagtcccgccgggccccgagccacgccagtctcggacttcagctgggtccgaggctcctctgggcctggagggcttttagaggagaagaggaaaccagcacaggagccccagagggccgggacaggtctgtgcgccagcggcccgggcgcatggcacagtgcctggatcaggattggtgcgaagccagcatcaaacggacagaaaatgaatccgatccgacactctaggaagagcatgaaccttccaatccaaccaatgtttgtgcgaggccaggttccccgccgcggtggccacacaagccagccctgtcctcgggacgcaaggtaaccagtccggctggaggccgccacgcacgcctggtctctgcagttgtggcggattcccagggactctgcccaggaaatggaaacccgtgagggcgctcctcaaagccgagggtggtgatggccagcgaacccgaaaaaggggcagggtgggcgccctcccatccgcttaagcagtagcccattccactgccccacacgcccaggagtggacgcaggagggagccccgtccgagtggacgcaggagggagccccgtccaagtggcgaccatcgcggggccaccccacccaccttcccttgacgtcccctgccagcacagagaccgcccgttgcggtggggcagtctcgggcggagatctttgacgcctggcggccagcgaccctactcggccggcagcgcaggccctcacgtcggaaggacactcaaggctctgtgacccgctaacctgggcctgggcagcaggacgctgctgtcctcccgcgccctcccacaccggtcacagctggggaagggggaagctctgccaagggccgggccactgactcctcagcaaggggctggagatgcgtgagctacccctgtccatgttcctcctggtgggcgttaggggtgagcctgaatcgtggcttcctggcagggtgacgtctgcggggcactacggaagtagaaatgggtttagtgcggtggcctctttggggatccgaagagtggctctcctgtgcgggcttcaagaccccgcccccactgctgtgaagtctgcggccagaaaaggccaagaacatctctctctccaccccccaccccgcactctgctctcccgcaccgtcccttgcccagcgctggggtttaggcccgcccaggagacctgggccggagaggctgcggggactcgggggcgggggtgcgcggggctgcggcgcggcggctccaggttcactaatcacatcagcagcgctctgcgccggctccgagcttgcagttgcctagcaatacccgcgaattcaattcctcaatcaataggcgcgaggctctgcatttaggggagcgctagcaaggttgggtgggtctggggagtgggtctcaagacagctacgaggggctggcaccgggaggctttggctaacgcggcgaggccccggggcctcggagaccagacgcctccggcctgggggtgtggcgcgctggaggatcccgccagaggaaagtggaacccccgacctcaggcgcatcctcccgggatccccagattctgcccggggcccgaagaagtgcagccagtaggtgcggagagccacggattcccccggacgggctgaggggagtctgccccagcggcctcccacgcccacctctatcccagccaggtgggttccccagttggggaagggcctttgcaggaacggtgcccccgcgatgggggcgaggatgggggcgggaggacgggatgagtactgagagaagagggacggatcctctcctcccgggatgcctcttccctttgctcagggaaggaaaaagaagaataaaaccaagacatgtctctatttacaaagtatatatttaaacacgtaaaaagcggtattggatacagacattcacgaccgcagaagataggtaccgaagcttcactcttgagctgaggcggagatcgattggagatttgtacaaatcttagaattaaataaacccaacagcgcacacaccctgcgcggttgcagactcccagccacgtggcccccggcccctgcccacccaccccccaggtcagcgtcgcaagagcgagagaaggagacacatacacacacggccacggacaaacagcaggacggaggggcggcagggacagagctggctggaaagaaggtccaagggaaggggcaaagtcagcccccaggaagggagggaggtgggagtaaaggacaggcgggagagaagggaaggcggcggccaggtgaagacgcgtatcccccagtcccgtccactaggtaacagacatgccccttcagtgaagtttcatctgaaaatagcatcgacatttaaatagatacactcggtcaacggcgcttctttatacaaagtctaaaataccagttttacaaatgtgagtagataaaaatccccattccaggggcttctctttataggcgcaatttgatattcaaaaacaaacacaatcatgtagtacaccgtttccctccttttctctctttaaaggcaagaaagtctggaggagaggctgagaagccgggagtgcggaggacgaggctggggttccctcccagcaccccccaccccacgcgaagctcccccacccccgactccccgcctcgctccccccgagtctgtgcttcctctggcgtgcagggcccccgcgcccctccctcaacaagcaatgggaagttagatcttcgctggccctttaagggcggggagggcagggaggctgcgggatccgtgctccaagagacgggggtggagtggaggggactgatttgtgcttttgagtcaaaagaggggcgcgcattctgcgtcctcggagcgcagagcggtcaagtccgccgggcaggggcgtcccaggccccgccgcctcgcacggccttccccgccgcggccgtccccactcccaactcccgctcctccctccccctttggcggagtttgaatgtcgagttcaaatagagaacactgcgaatcgaaaagacctataaattatagcttttgcttttaagaaggacgggggaaaaaaaaggaaaaagcaaaagttccgatgcgcattcttggatgaaaaccccgcctcgcccctccttcccgtgcccggccggagccgcgggggtgagtctagccccagctccgagctccgagccgtggtcctcagccacactccaagcctggccgtggagaggccctgggtgcgaagccactgctcctagcagcgcccgccgccgcgcctccctccgtgggtcccgcagggtgggcctgtctggccatgtgtccaccacagagctggcggcccgccctccccaggcagggaggcttgtccaactcttcctgggaggtgggggccaccgtctcttctcctggcaaagctagaggacgcgaaaaggaaaagtccaccccaacacttttcttgcaaaacaactgtctcgaactctcagcactgacacgcaatcctcccaatttatcctggcatttcgggaatgtaaacagattcgctggatttcttttctttctgcggagtaaggaaaggaacgagggaacggggagattttatccacatgacatacacacgatctgcgtgtaccacacacacacccctccctaaagtgcatttcctggtgtggtcctggggagaaacctcctgtccctgcctgctggggacgttttaaccttcaacatcacacacgaaaagcttattcaagttaatacttttttccctaatagacttctttaccttaaaaaaaaaaaaatagaaaaaaggaaaacagactgaccccacccccccttttttctgattggggagccaaccttttgttggcctgcctggccaatgggaagagagagcaaatctgggccgggccttggtgccaggagtctggcattgggctgtgggagaagggaggaggggtgaggtgggcaggccaagcccctccagacactctcagaaacctgtacccagggcccaacttccctagagctctggggcaagggggcccctcctgccccagctcattcgggctgccccaactaaagcacaatgagagtctctctcctttaaataaaacaacttcgagttgaaatatatatatttagatatttttcttaaataacatatttacatctaatagaaaatataactctagagataatctttccaacaaaaactgagggggaggaaggagggatgaaaggggctggtggggtgggggtgacatcagggacgggaccagccaaaaggccacatcccacccagaaataaaaatcactatgccaagctcacgctcactctctcccctgctctcctcctggacacacccacccagcattcatcttttctctttaaaaaagccttggtccgtgttactttccttaatggtgacggtcaaaaagtttgaggtcacgtccgtgaccaccaccttctccaggttagtcagggaggggctccaggactcttcctccgggtcccccaggattctggccacagggatcctggcgatgagggagggccttcccccctgggcccccatgtcccggtacaggccccccccagagctgggggggcctgagccatgtcggacccgggtgccattgggatctagggcaccctggcctttggcctccaggaaggcagccctgtgctttatcaccctggccgggaaggtgtccacagccagtttgcccgtggcctcagctgagctagggctggtcacaccacactgcaccaggtccgagtcctgtcttcgggccagctggatcacactgtggccggctggaaactttcctgccccggaaggggtgtcgtccagcttcctgcccttgaggtactctccgaggccggcgctgggttcgcctaagggcctctgtgaggggtccgggagctccttccggggcttggggcctcgcttcttcgagctgtcccccggtgagctgggcttgtcatccactctgctggtaccccgctctcgttccctctcacgttcccgctccctctctcgctccctctccctttctcgatcccgctcccggtccctatcccggtctcggtcccggtcccgaggggcctctgcgcggcaggtgctgctggtgctggtgctgctcgctggcggggacaaacccatgtttcgaaggccctcccgggcccgggaagtggaggccaggtcctggggcgagcggccagggtaggggatccggatgcccctggctgagtcacttcgaaactcgtaagttttggcctttgccttggcctgcgcctgcaggagagaagatggtctcaagagtggggcagggccctgtccacccccacaggactcctcctctatccctgacctcctatctttaccctatgatgcctgggaatttctacatggatgcatggatgggtgggtgggtgggtgggtggatggctggatgaatgggtgggatggctgttggagctgagaggtagaaggatgagagaagaggtagaagatttggctggaagtagtcatttgcaaaaagtacactttttgcatttgattattgtgtccatttgggagggggagcgtaaaggaattctagtgtggccaagcccgtccccccagacacagttggtgctgctactgacttggtgacatcttgtcagggaactccctcctacattacaaataggcaacatgtgtggacaccccattggctcacagccctcagagcccccttcccacaaatcactccataacatggtcctccaccattggacactgccaacctactttgaggaggaaggttttgggcttgggtccacgctttttggggccatagagctccatctctctttccctggagaaagaagaaaaggagaaagggtgcgtgagtaaagaaagcaagtgggactctagtccaggctggaaagaagccactctacttgtttctaagtgagcggctgggacttggaagggtctgtacctttcctcaaaggctgcgagcaagcgagcatccaggatgttttcctccggttcccatgtgctgtacctaaagggaatcaggaagaagtgggcatcagtcccaggagcagggtgagagcagagggggtgtgtgtgtgtgtaacttttctcattgcattgtattgtatttcaatgtaaaggcaaaaagaggaagaaagaaacctcccgaataacagtctggggttgagaattgcatataacctacttacttctgcgaccatcccttccatttcacgaggtattccatgcgtccctgcgggtgcaaaggcgataatgtgtgtgcatggggagaaacgcatgacgaggatacaagaaatgcatgcgaaaatgcatgcaccagatgaatgctcgaaaccccgccgcaaaaggcacgcgcccgctgcatcacccctgcacctaatgctgcacaaagtgcatgcaccggcattcattccccaccccgccccccacccatgcaatccgtgcatcgctgcaagtctaaggaaagcgcctgggctcagagctgccgccgccgccgccgccacggccgcggccgctgctgggacctgggggaagggaagctgggctgcagcagggggagggaacccgggccgggaggggagggcccggccgcacggaggccctaggcccgggggcacctactttccgtatgcgccgcttcaggagggcttcggccgcgaacacccgctcccccaccgctgaaagctccatgttgactcgccgcttccccccttggccgcttccaggagcagaaaagcagcagccagcgcacgacagaccataatactctcccgctgacgtcagttctcctccccctcccggcgctctcgctccctcccgcggcccccctcccgcgctcctccgctcggccccctcccctccgcccagtgcttcctcccgccccacgtgttgctaacgacgttgctaaagccgagcggccggaggcctgcgcccccgcacgctgattggacgagctccgagccacgcccctctgcctttctcccccgcgttgctacgtgaccagcgttccaatcgccagggggcggagtccgaggcgactccagagaccgagcgcgcgagtgggagggggcgccgccggaagtgacgccaggggaaggcgggcccggccgctgtcagtctgcggggctggcgaggggggcaggccgccctctgtcctcgccggggcccccctcccccgccaccaagttgtccctccggcgttcggcgtcccccacagctctcgctgggatccccgcggcgatgtcagcccggctccgcccctcggcagaccccggcccgccgccccacccccaccgcccaggactcgcgcggtcccctcccccagccgcccgcgccgcacaatgcacaatgcacaggtgctggggcgccgcgggccgcgcccgaaccccgagagcctgcggcgcgcccatcggctggcttctcccccggcccccgcccccctcccccggagccgcacacccgacccccggtctccatggcaacgtcccccccccccccaagccgggtcccgctaacaaatcaatgtgcatgtgtctcaggctcctgtcgcgcggccctgccctcggccaccctccgggccctgcgagccgggctggctggagcgctcgtccccggctccgaagccgaacacagacctggtggaggccgggctgttccctccggagcccggctgcagcccaggaccccacagaggatgtcgcgcggcttcttcctgccccccgaccatccccgacgcccgcagccacctgcccctgcccttagcccaagctgcccgcccccgccaggcttcggccccgaacctcgccttcccctcgccgccccctgctcggggcctgggtgggctaagggcatctgggcggagccggcagaggatggggcgagcggctgggggtgcgtctggctttccccgaaccccggcgcccggcccgcgcacttcctgtccaccgctcttcccaacgtgggcggcggacatcctgcgagaaacgccagcgcgggaagctgggggacgtcgccgggtccagtgcgggctgggcgagagggtctcacgcgcgaagatggcgggctcctggaaagggacaagggccggccgcgaccgccttgccgtgcgcacacaagcacgtgcaccgccgaccctgccgccagctaggctaccggtgacccgtggcgggggcggcgctggggacagcagcctcactctgggcccagctccctcccaccctgttctcttattgctcaagctccaaatcacaactcccactccttggaacccacgatttagttcaaacatcgatgatcagcctgactgcaagcagtttcccttggccagagatggggtggagaaagagggggggaaaagagagaggcagagagagaacgataggaagagagagagaagcagccaaggagtctgacacggaggggcaggaagcccagagcggaaaactggcctcctgtccaaagtgaggcgcgcgcaggcggcggcagccgcgaggtcctcgacccgccgggcaagcggggcgcttcgcccatcttccctcccagtcgtgccccagcctctggaaacacgggtttcaggttttggccttgttcctaaacttcacaaggtggccgcttgtcgaacagtcccatctctccggccgttctgtctgaacgaacagcgcgtcgaggacgctcagatctcccagtgaccctcgcgggccgcccgtgggaggccgccgacggccgcgtccttaatcataaaaagtcattcccggtaacaaatagtttcgtcggccggtgccagcgatacagctgtttctgtttaagcttaaatactttccaacagtttgggcagtaaaaataaagtcggcctcagccgcctgtaagtgtctggtttccccgcccagagaaagcccaccctccgccctgggcccgggtccctctgcctgtcccgcccgcctcctcttggaatccgctgcccgccaaggacaacagcgccccagccccgcaccggccgcctcagcccctcgagctggctccagggccactgtggaagtgggagggagggggccttcccagagtgggccggggggacctgacccgcctggcctcgcgccctacccccacccctggcaagctctcccgcacccgcgaagagcggtgattttccttcagatagggtttctggaacccgcttcccggagttgtgcttgcccttgatgcctttactgatcatggggtttgcgctaggcgtgcagagggcgatggtttcagtttctccccaaaaaagatagctgtagtcgttcctccatgcgttctttccattttccttccttccttccttcttcctcccttccttcctcccatccttccttccttccgtctccctctctttctgccccattctcccttctttgcctaaatacctctgaaacttgaagaaatggaacccctgatgctggcaggtgcggccccctcctctggatagggtcttaggtaattatcttagcttccccacccaattttccacctgtctttgtgcctgatggcgattatttcggaaatgcttgctctaaacaaaactatcgcttgcgaaaagtctgagtttgcaaacgtcggggaatcctgcaaagcttgtggcaaaggtggaactcgattcagaaggaaggaagaggtatagaatgatctgagggcagggagcctggctcttgtcagtagcagacgcgctcagtcccgccaaggaaggcaatccccaacggggcagagtgtgtctcatccctgcctggcgcaacccctgccccccaacccgtgagagagcagcgttgcagggggtgtgaaaacaggtcaccgggcaacctcattcctcgacagtttggagacaaagcgggaggtggcggtctgagaaatgggagcccacctcccgggctctggctgggtgggcgcgggaggaagccctgtgttccgggagagggtgctagcatgcgtgggcgtggagggggaggaggtttgcagtcattccagccgggtcagatccagaccgagaggacaggtcagctggtggcatggtcttaggaacccacagaaagaggatccttgctccccacctttcttatcaacccccttccccaaccgactcaattctcgccacctcccttttctccatacaaccgctttcctgtttcaaagttagataattgcctttcccacctacacgtcccaggagcaaacaaaacaaagttgtaaaagacaagacacgctactcttaatcccattgctcggcggtccgctgctcaggctgcggctgccaggttggcgtgcgccgcctctgcagtaaataaggtaactgcttcctattactttagccccatatggctgcaatttgagtgtctttagagacggtgcgtgtgttggggcgggggatggggggagtgaaagtggaaatcaaatgctctcagatcgcatttttatgaaggaaattgtcggcgattctcttaacagccaccccctctcctgagatgagctgccccgtttctttgtttacggaaatgcgggcgcccgccctcctagggacacctgcttcccaaacccctaggtctccggccctgttccgcactcttctggcgacctgggcgcacggcccgcgactgcccttcccgacaaagggtctgcgacctgctcccgggagcccgccctacccttggccccagcctctaaaaggtgccaggactctgccctcgatgctgcagcctcctgagagcccggagtttgggggccctcttaggcctccctgggcccgcggaccacggactcgtcctccgggagggagggtggaggctggagcactccaaggagaggggcggacgggccccagcggggcgctgggctcctgggtcttgggccaggccggcaagccctagcgcgtcctctagcttgaggatgaggccggcccggttctttgggagcgtttcaacttcgcggcttggcgggcgtcggacctgcccggtcttggccgcggacgcgggcagatttggaagccaaccgtttgcctcgggcgggccggcagtgaaatgagcgcgggcggctccgaggcgtggccttgtggccagtggcttacctcccgcggtcccggagccgggcgggcgtcccgcagcgctgcttcctagacgccgagctagggctgggcgcctgccgcctgctgcgggaatgccgcagggtgacccgacattctggaaactggtcccaaggcccagcctgggtgactggaagtgaggttgtccaggtttctggccttggttcccgccgctagttgttcccaagagcaagaagctcccacctttcctgtcccactttctcctccctaggagacatccacacatcctccttgttagagaagcactggaacaggctgcaaaggataagaaggggctgcccactctacaggaatctcccacaaggctgcacacattctagaagccacatttctgccttaaaccccggaaactgaaatcaggccccctttcttcccctccacaggaagaaaatatcccctcagagttaagcaacatctattgcttaactagttgccctatatctagggcctgcgttatcccagttaacattcacaacagccaggtaacatcagttcccttacccccattttctagatgaggaaagcgaggcaccgcggggccaagtcacttgctcaggggcacgcagcaggggttctgcctgagaagccgtaagctcacgtccctaaagctccgcagcaggggctttggatccttgtgaatttcagctcctccaaggcttgaggaaagaattcaagaaaggtccagtggagcctcgtggaagcgcagagcagtgctccagcaggaggaccctcagagccctcggcaacaaggatgagactggaacaatagagacaggagggagttctaggggccgatttaagtcaactggaagctggatgttggtgggcgttttcgcttttttttttttttaatgctagagcacagtggctaaaaaaggtgggctctggggccagcctgcctgggttccaatgcacttgctggctgtgtgcccttgtgcaagttacttaacctctctgtgtttcagcttccataactataagaaaaggaatattagcacgttttcccaacagagcccatggggggttcaatgagatatggaagcacccccacactgtcaggcacaggcaaatgctcaataaatgttcattattagttactgttgttgctgttattggtgttctgagaccagaacaaactcataggacctagtgattctgttctgactttccccaggaactccagtatcagcctcggctgtcccttcttctccatgaggggcaagcccagagagggtgctcagcacacacccatccttccctgggaaacggaccgtatgctgcttagaggcagttttgattcattccttgggcatctggaccggttgggccacgtgggctcgctgggaaaacgcgccggcgtcccctcggagcgccgaggccgggcgagctgagggtgcggtgccgctggagcacgcgcacagcgcccgaaccagcacgcatgcgcgccgcgggccggccccatttccgccccccccccacgcgcccccccatcacacgcacacccaatccccggactgctcgctggtgctgcttgtgagacccattcctaggagccccaggcgcccttggggagcagaaagaggcggtccagagttgggccggacaaccgcaacctggaaggagtccgggagtccttgggtctgggcgctcagttctcacggtctggggagaaggggctcagacgggacggactaggcacagccaggggcggggactgcgagaggcgaggggaggccggcagggtgtggcggcagagcagcccgggacaagtgagcggcctagagatcaaggccttggagtcccgtccgagagcaggacgttatcagaaacctccagccccaacccctgcctggagatgcccggggcgcgctgactctgttctcgcatcaccccgggccctggctcaacgcgtgagcagcctgtggttccagataccccgagtggagagtttgaccccagattctgcctgcactgacaggcttggcctggcggttacgagccacggttgatgagcgcccctcctcccgtgacccagctcatgagaaaggcggggagcaccaaccctcccacgggaaaacacggggagaggctgggcgagtcaaggaatggtggcaccagagcctgggcgcagagaggcagctggacctcctgggctcccttgagccggagctccgccagggtgggcacttctgcctccagcgatgctgggtgccacagtcctcccgcctcctcctggaccacacgcggctctccagagtcccagggaagctccagggactcctcggactccgcctggcgcttcccgttttttcatttcctaccccacccccatgcagaaggaattgaagtgacttttttgctgggacgtcgggacctcaagtcagttccaaagtgggagtctctcagccggtgccgttcccttgcgagattgttaacgccaagagccacagtccagcttccccttttagagatcagaaaatcctaagtgcagggcctgccgggtcattcgagaaggcacaagctgcggaggccagtctggggcctctcgcagaacctcggggaacagaggcgtctgccgggccgcctaccctccgcaagagtgggccacgcgggcggcaaacccgagggcagacgtttgggagctgaccgagaaaacgcgacggtgccggcgaggttctgggcgaagcctcggcgtcctccactgtggtcgacgcctttcctcgcagccccggtacagggcttcctcggtgcacccctagccgttgccccgggaggaggcgccgtctgggacacgaaggggctcggctggcgtcgaggctccgcggccagagcgcggcggctccgcgcacgcccagaagccgtgttgccggttccggggctgccggaaagcgtggggccaagctgctgctctgtgcccgcgcaagcgcctcgctacccgggcgggaccttgctctctccggccgccctgggccgaggggtggctcagcatcgtgggggcggacgcagacggccactcggccgggacaccgtcggcccgggagccgtgatgccttttctctctgcagctgaagcctccgatcggtttccccgcccttctgtaggaaatcaaattcagggaacatggtaccgtatttacccgcacaacttcctcccttgacattttgcactctcgaagttggggcagaagtaattatgcaaacatctggggctgtcccgcgccgctaccggcaccgtcttattcatcctgagagccgcactccctcatttgcataataatggcttatctagaataacacagcaatcagaggcaaaattaattttcttcagctagtccttgagatcctaaaaacagaggaggcttatggcaagaaaagccggtttagcagagggtgtagggttcctgaccaggaccaaggagagagaaagtttaaagcagtggaaatgtgatgttcacgctgagtttctgtatttttctagtttcaacctcagagcttactttttggccaaacggatgaaggggtaagccaccgtggaagtcccagcagatacccccaccatcgccccatccatcctgggaggttcggtggccctcgaggcagagacatggactgtggctggggtattgggggcagatgttcaatgtgttggggtgtggagagggtagattggcagcctactgaggattaaaggggtgtcctgcaaaccagctccggggtctgggtccggaccttccagggactcagttccgcaccctttgaacagatcaagacagagcacttccttgctctgggatggtcgcctcagccaccgagacagcagaagtcgttgaattcaaagcagaataaaggggtgcgtgggtggcggtggggtgccttaagtggaggaaacatcttttatacattaaaaaatcttcttgatcttttttaatacgcagaggagtgggaggagaaaatccacaaataaatatggtaaatgaatttggaccagaattgtaattgcagggccactttcagggcaattccgggctccagacaatttttgcagtaaaacgtgtttcctccgagggcaccattctcacttttgcagtcacagagcagagagtgagaggagctcaaaagggctctgcagcacctcccgtcacccctctacggacaagaacgtcctctctcttggaaaagatgcaggttttacgtttaatgagaaggtgcccacagttcaggcttgcaactaagaagtttggtatcagtcttaagttcttttttaaaatgagcttttaaatagttcagggttacaggaggaagcctaggaaggaattgctgtgagtagagcaacctgtgggtgagatgggtagggggaggaaaaatgggtggaagatctcagtgacaccttcagatgctgtattggtgggaagggaggagggtgccaagggactgtagggcctggaaaagggagtgtctctggagagccgggctgctgggttgggagggataggcctcattttatctccttcctcttccctttgcggtcattcccactgcccttttgaggcagtctctaacttttttacaccaccccgacggtgcagcctgactttagaggtatcatctcctttccaatgtgtgtgtgttcgtgtgtgtgtgtgcctgtgtgtgtgtgtgtgtgtgtgagagagagagagagagagagagagagagagagagagagagacagagcgagagagagatcaaagtttccctaggggaagggggcgctctgggggaggggcgccccaggatacccgaagactccagctgtccccaggtattttcccagccaaaaacctcagggggagttgggattccaggccttccattcagtcccaggtttctccctcagtttctcccttttggagagtagggaggacctgggatgaatagaagaggaagtggccagcagggaggcctgcaggggttaccaattcttctgttccctgaaaccttttcttaggtctgcaagacaggatctctggcggacctcattctccagcctgctccaggcattatacgagctctgggatgggggtgggcagtcccttggggaactgtcctctctaccccacccccactctgtcccaagctgaggggaggggttggacctctcctcttgaggggggcgccattcagcctggaagggcctgagcaatgggaagggtgtccactggataggggtgcaggacactgggcttcagccttggagtggtcttacagctccccagtgagggacagcggggtgggtacaggtccctctcaggagtcgggaacatctaagagcatatccccaagtctgaccctcactttgcacaagtctggtgtgcagtggtgtccagccgaaatgaagaaggtgggcacaggtgggcatgggggagtcgagggtcttcaggagcaggtggggccatcgctggcagagatcacagagatgtcgttcccagagtgagggcatcgagtgtagggaaagaaaaggggagaaagacaggagtggatgttgggggagatgatttgccacggcaagacagggcaagactgagtcactttctcccacagctcctgttgggtccttcggcacctgcagtctaacccaggtgcctcaccagctgcctctctcaacactgactgcccgtcccttcaaatcgtgggactagtggccagtggaatctggggaagtgcctcacgtgcttgcaccacaagatcaggtctctctcctggaaatcagtggtcccacctgcagaatgggccagttctttcccattttgttgctatgacaggcatctgtaatggacccacaggatcccaggaaagcaggactccatactacacacacacacacacacacacacacacacacacttgctgtttttccaagatgagaaaggagtcctaggctcggtttcttccgcagcttctgtgggttcacgcatccccttccctggaaggaaagtttctggggctgtctacatggcagttccaaggatgccctgggaagtggtgtgtgaagggttgcagggccctggattgtcacagggggcagggcagggcagagggtggagctaggcaggactggaagaaagtgtgcaagggcaggaagggggttggatctgatacccaccaaccactcatcacggcatctgcgagggagtgctgggaatacctgtttctacagtggctcaaatggacatgatgtgttatggtgtttgtatcccattggtatctagcctggcacaagagggtgtaccagagtgctgggagtggacagatgtagccaccatccgctgagtgagggctgctctgagccaggctttgtgctggaggtttacgggactctgcttctattcctcatcacaacccttagagggaggctccatttaaagatgaagacacaggctcagagggttaagtaacttgttaatgaccaagttaagtcacaggacagagctcaacctaaatctgtcacccaagagttgaggagcctaaggggaagcttcagggtagctcttgctggtgtggaaccaggcacctaggggagccgggcatggctgtgctgcgctagggtttggagcttggcatgaagagcagcctgtggcaatgtcactggctatggccaatcccagcctttggcgggaccaggagcttagcagcctgagaccagagacccactggcttttccagcctctgtccagctgctcagggagtaggactggctgagatcaatggtagtcagtttcaagtccccatgctagggctcctgggttccaggattgacaagccacattgacacagaagcccatgcctgggctgctgctgagatgcacctgcataatgcataaaacagtggattgggaatgaaatccaggcttgctctgcccctggctaactgggttaccttggacaagtctctctctttctccctgcaaaaccagcattcggagcaggcagccttggggccgccagtctggtctccatgttcgacacctcgagatcattcgtgtaggcatatgagggttttcctgaaccttttggaaatacttgttgactgttgagtgctgaccactgatgcacatgcccagggcagtacacagaaccctggagtttgtgcctgcccaagaagctagggactcctagtaggagtggcagattcctgtcccagatacaccgggtactggccaccattttcccaatgatgccaggcccagagctaccaaatacctactaggagacacagggtggcaagaggaggactccaggggaaggcctgtgtgactaggctaccattccaggctcaactctggcgaggaacaatctaaggtgtgctcctccctccagccccacactgctggcagcaaggctgcagctcagactaattccaggtacattctataggtggcatcatgctactggaaatggcctccttggagaaagaggctctcttgtcagcatctccaggcactggcgagccgaggcaaggttgacacaatcacagtctaaactgcgcggagaaggacacctgaggggcgatgggtatgtgctgagggacagtcctctccatattaggggccactgctccaggtgcataagcttcttccgtgccatccaccggtgaggccttggggcctgtgggtgtcgggggtctctcctgccttctgccacccgtgggaggtaaaggcctcactgtgcacctggtgggggtgctaggcgggctaccactaggtctacaacagcatacacctgcaccaagtcgccttgccaccaggctgcgtgagagaactgggtcagtgcaccacgtgtcctagccagagaggcccctccacactccctggacatcctggggccactttcaccgtccagacccttgcaggggcagctcagactcctcttccgtgggcaaacagaccagccagaagtggggagagggaaagcaagtggggcgtcctgttcgagacggacactgaggtcaccagcacaggcaggcgtcaatctgaccaaggagaccaggatctcaggaggcttcacccaggacccaccgcccctctggcagagaatccctgagatgactccttccttgcccagatccggccctgatggcttcaatcttccgagctggggggcctgtcccctatccccccagcctcttgcagcctgccgtcaggagcagggctggcacagcgacagagaagaaaggtgtgacagcgacacctctcacctctcccttccaccacctggctggctccaggccgcccgcgcctccagggcacagagccagtgggtcctcgtggccactgttcccggcctcctggcgctgaggctccacgcagcactctaccggcgcctccccccggcccccgccccccgcccagaccctagggcttttccccttctctcccccaggcgttctgcttggtttgccgggatcccaggcgtctgctcaaactcaacacggactggctcacatttttttaaacaaaagcaattagatttcaatcccggttcatctgcatttgcacctccaaatgggggggcagggggagagggaaaggatggggagcgcggcggcggcgagtggcaccttccgagcgctgcagctggccgggcagccattgcgccggccacatctggcccgggctgaacggccgccgcggccccctccccgccggctcccggggcccgcgcgccgcagcccgctcggcggcgcgctcatcgatcgccggggccgcggccgggcgagcggagaacaaggtatagcctgtatttaggttcctgcccttatatggcgatgtgcgcgagcgcccgccgagcggccgcaccatataagggcacgcggcgggcgccgggctgagctggtgcgcgctcattggcccgcgcgtctctcggcaaccggctctcacgagtggaaaccagccagccgcccccgcccgctccccgccccctccctttctttctccccgggtatctccgctcctcgcctccgcacccccttcgttgcttaacccccctttttgcctgtaccctctccccaatttttcttcccgcggccttcctcctccctttgcctcgttgtcattcttctcccgtggccgcttggcctgtcctctcccgctccgcgcacgctcccactcccaccccacgcaccccctccccaaacccggcgagcaacggcggaggagcgggaaggcccggatgcgggaggggagcttgtgtgcgtgtgtgtctgtgcgtgtgtgtgtgtgtgcgtgtgtgtgtgtgtgtgtgagagtgtgtcgctgccgcagtagccgctgcagcatcaggttcactgcgtgcacgcacggggctctgggaacagtccgagaccgcccccccccacccccctccgccacctcccccctagataatcagagcaattagctgcaaaagaaatgtgcttccgaggctagggaagtgctaaatcataaacagccctagatacctccaaattagcatctcccagggtgtcccttcgggctggatttctgaatgcaatcataataatggtaaatcgatgtctcatttaaaggttactttaaaaacctgccaattgttgaggaaaaaaaaacccctgcgtgcggggagaaaaatgcactaggagaaccactctggggtttccaggcagaatgcagtggagcggtggctgcgggttgttggtcaggtgcccagcgccgggcccacccgcgggatgggagcgggcgaagagagaaggcgtagctattcctctggggataaggctctcgatcgcctcaaactcaggcagaaagggcactgcggattcgggggcgcccctcgccccctccccaacccgccgaggcgcgcgcacgcgcacgcatgcacaggtgtccggctgacccctctggggctgtcacggttccggcgcgcgtgttctggcgacgccgtgggggccagagccatcctctcggggacccactcctgtcctgagttcacccaaagggaaccgctaagacaatggacaccctagtgcccttagggactgtgcctgtgaccgagctcgcctctagggctgccgcctgcgggaggcgcccggcgatgccccctgctgggcagcctgcgcctggaacaccgcgcaggtgggggtcgcgtgggagggccagctagagtgggggatggggaccagggcgcgatgaccagcgcgacctccgcccgtcttgggcatcctcccttaccctcgtcctccttctcttcaaaatctcaaattccctaacctggtccctaccagaggaaggtggtggaagcgggcactgccagggaacgagggtgctagattggggagggcgctgcctgctggatcgagttagcttcggccgcctcctccttgctgtttctgcggaaggaagcgctgcggcggcggcagcccttggtgccagcatgtatccctccctgaccttagctgagattcgctgccgcggtgttttgcccagaagaaagctgtttccctccagactagggactggggagtgcccttggggcggagagtttgcctgggttttcgcccagcgccggacctctgccattgagacctcttcaggtcctggaaaatccatggatacccgggtgctgcctcttggtgcccccgaagtacaccatccctgacccgctctccccacgcccatttagccaggtcatttataatagatccccatcttcaagtttctgcgtgcttaggtacatggattcctccgcccaggtgggggagggggaatgcggacccccggatgtcccccgacttctctctgcacagggacgtgtctcaaatgcgccttttcttctctgttcttaaaccccaggagcagaagcgctcccgaatctggaaaccccttttcctgacctgttggctcctggtccctggcccctgccctcttatacactgaatttgaattttccaggcgctggtggtgaaatcagaagagtcgagaacgcagctggcggagagggatgagagagaaacttgcagaaagggaaaaataaagcaccaagtctacaggcacacctctccccggccggcccggcccgctggggcctgggttcctttgggttggggaagtgggggtacgaacccacgcggctgtgccaaggggtcccaactccggagtccaaccccacccaccagtcctctgtgcgcacttttcgtttatttctcagcagtctcagtcctggagctcctggggcgatttcgtcccctgccctggtgcgcccccgggccctgccctgagcccatgccccaggccgggtgtccagttcaccctgagctccccttggcgcccggagaagggtgctcgggcccgggtgctggggagcggcggggtggccgccggcgcctcttcggcgcggatggctctcggcggggccgaggagggggtcgcagagcggctccccgccgagaggagggtgggcgctcggcacctgctgagctacggtggtggctgcggtttatggcgcccgaggatccacccggatcttctccgcggagttccgggcttggctcgtctgtagtcagcacgcacacagctttgttatttgttatttttttaatttttctgcggggagcatcggggctagcccgcccagctccaacgccagagggtgtgggggagactgatttctaaatgggtgggagcgacacacggtcaccgaggtcaacaccccattaacatttccccaccggagcgccgcgacctcgcgagggcaccgggcaccggggtgggggtggggacagaccgagcgcgcccttcctgcgcagtccccggccgcccccaccccgtgccccctctgcccgcaggtaaccgcccctcccccgctcgccccgcggccgcccccgcccgctcccccgggagggtccctgcgcccggccgagcgtccccgggcgggcaccgagagcggggctgggggctgcggcgcccgcccccgccggggcagcgtggcgactggcgccgctttggcagccattttctgcagctgccgcggccggggctctgcggagtgaggcggaggctgcagccgccagacagaggcggcgggggcggcgggcgcggggtcaccggcgggggggcgcccggcggccggaggggggcgggcgggcgctgtcgccggtgcccccgcccctccccctgctgcattgcaggcagagcggggccgctccgcgtggcgagcgcctgcgatcccaccctttccccgccatcttgtaccccggctggcgccttcccaaagcggagctgccgcagacaaagcccgccccgggccggcgggggcccctgcagcccacccgggctgcgcggcctgggggcccccgaggcccgcaccctcgccccgcccctcccgggggccggcgcgccccccctcgccccaaggggggctctgcatgcggcgaccactcacccagccccagagggccggccgggacccccccttccactcccgatcgccagactggacccgcgcccaagccccagcaccagcccaccctggttgctggaaggagtaggggttcccacaggcgcggcacagatgagggctggggactttttctagctctgggttccttctctcttctgatggggttgggggggtcactagccctagagcccccatcgccccctcctagggccagccccacgcgccaattttcccacggaagaaccgcaagaaagacggcagcgtgggcggctctcgagacccccccccgcccccccgcccagcagctgctgaaaccgggaaaattgggcactccattctctcagatgggagcactatcgcctcaatcccccagccctctcggtcctttccctcgacgctcctacacaggaactcgggacctaggccctgggctgctgtgtggggagtgaggcacctcttcctcagcccagaaacaccgagaacccggtgcctagcagcctatgttatcaagcatgccactccttgataggaaatttgctccccaatgattccattttcctgtctccaagtcctcaggcctggcattgggatgggagcatccaaggtcctgtccacaacaaccgatcgtatttcctggggacagctcgacccccaggggagcacgtggccaccagctctgccgccttcctcctcctgagaccgaccctaggagtcctcgtgccccagtctacctagactcccaggagcgtccggccggaagagacagtgggagatgaggaaactgagattgggagggggacgtgatggggtaaggccattcctaaggcttgtggcagagctgcctcttcaccccacccccatttctttcagatgcggagatcaaagcccaggctcactggtgggtcgggagctcactcctccaagtacacttggccaacctcggggagcccggcggcggcgggaggggcgcgggcacctgggggatgggggtggggagcggccagtctgctggtccacacctgaaaacggggtttccccgaccggatgcctgccgtccccccgcctccactctgcggggtcgcctgctagggtcgggaaaggaccctccaccgccaccctcggggttcggtcctcccccaccaacgtctgccagtccgcgtggattccgagcccggctccggaaaccagtctgaccacttcgcccatttcccaagcctccccgggcggcggccggccagcttccatggtgcggtgagccaggctcggccgccgcctcggccgccctgcgatgaatggctctgcccagaaggccggcgtccaagcgacgctcccgcccgcgcgcccggggcctccaggccgctccccgccccgtgtccccacattgcgaaacggacggtcggatgctccgctccagggccggggtcgcctgtcccctgccgacctggcgcagagccgccttctgcacccggccccgtgccgccctggggttgcttacagccgggctgtgccaccgagctgagcccggaatcgaatggcgggccgcggaaaaggcggccaggcccgcaggggcgactgctcgaggtcccagaacagcgcccggggagccccaggccggcctcgaggggaccgcgggcgggacaggaggggaacagctggcatcggcgcccggcttcagctgcccgactgcggtgggcgggtaggcacgttcccccgcagccacccgcgcacgggtttccaaggcgtcaagggcaattcacctggtcgctgcaagaaagcgactgcgcccccacgtccagccagccgccttgtccatgagaaccacctggagggcagggtccagtgcccgggtgccacccgccacgtggtgacggctctgggatggcacaggctcgtgcgtggccgccgggctgccgtctcggcccctgtgcgggtctgcgctttggcggccgccgagccgaggggagaaaatggccggtggcgcggggcccggccgagggtcgcgggagggctggcaggcgcggccgctggaggggcgccgctctcagggctcggtcaggcggcccctgcgactcctggtgcccggctgggacacgtggggccggctttgcggagtcagcagggccaaggtgcgcggggtgcgctcccccccggaaccccgccccttctcaccccatctcgcttttttgggagaggagagtggagccgtcagcacccactggcagtgtcggtgctgtgctgggagtcctcccagaccagcccactcctcctggtttgagcttccgatccatccctactcctttacggttcttcttccccgtagttaacctgcggagaggaggaggtactgtctccgcacaaggtactgcggaggtaccttgcggaggaaccttgcggaggaggtactgcggtggggaggcaggggggaggcgcatctgcctccgcacaaggggtctaatggcttgcttattccttctaggccaggttgaaaggtttttaaaagcaggtgggggtgccaggatagtgagaaaaacaagaaaagacactgctttttaccccatgcggggcagagctggtctcctttctgcaggtgttgaggggagttgagtaggagcccagagctggtacaggccccgtttaacgtgcccccgcagagtgagggctgggggtcaccccataggcaggggagcccttctgggagggaattcctgcttaggtgggaggttgacctgaatgacatctaggtcctctacctcccagatgccgaattttcagggaaggaaccaaatggatgtatggcccatgcctgggtttgaatcccagttctggccttcattcctccaggcctccatttccttgtctgcactatggggccatggtgagaactctgaaataacaccaactgcctggtgcttggtaggtgccacattacaaaagcggtgggaaggaggccctttggtttccatgtcggtggtcatgtcccacagtccccgttgccatcctgattatggaaaacttcatttcatgctccaaatgttcctcaattcctggcactgttctaggtcctgcacccaggctggtatgaaaaaggtgccgagaaggtcccatgcatcaccagcctggaggtagcagcagaagggaaaccagtgcctctgagagtgggcaactgtgccccatccacctcctcttcttcttggagatctcaagataagacaagagacatcaacctgggattgggtttctgggcagagagtaaaagtgagctccttctgcctgtgcacgcagcttccctcggtactgggatagccgagatcccttactagaagcagctcacaaaacctcccccagttactgggatagcccagacaccttcctagggcagcagcggaagaaagaaggggacaaaataccaacgaccagaaagaagaaagaacttagcctcagtcaccagccactgggagctgatagtaactgaagggatggaaagccctctgggacagttttagtgggagccctccagagcctggagagactgcaggtggagcaggaaggtggggaagaattagagcagtgaccccggccacttttggcctcacggttctgcacaatgagacattgctcatcttcagagaaccgtgccattctggccatctggcatcctagacaattttccactgtctctcagtatccagccatccagccatctagcctcctaactacttctctgtgctggtccagcccagtgctcagagttaggatatttttatgaataaaacagacctagcttctgccctcgtggagcttacagcgtggggcgaaaggagactgatcaaaatgccacacacatgtaatttacaaccttgggaagtgccaagaaggggaagtgttgggtgccactgagaacattcacagaggttaacctggggctgaggtggaggaaaggtcagatggaagctgtctaaccaccctgggcttctggcttaggatgtgtagggctagcagctcagcccatgaggttgtgtcttgaacttgggtattgatggaatagctatagaaacagaacaaccatgaagtgaagatggtgaatgaagatcctctcatcagcttgcgattgcatgacagaggaggctgcaaggacactcaggtgtgaagacgggtgagttgccagttctggagtgcagatgtggttaccagcagcctctgttttggaggctactctgaagccatattcagcttgggaggcctcctgcagggttgacccagttctggaacaaaccaaggtgtttgggtctgaaccagggcctgagcagatcccatcccatatccagctgaactgtctcacccagtctgcattgagtatcggtcccaagtggaggccacaggaagaagtgctgttccctagtggtcttagatgcttcatcagctaaagcgtggggctcagtctcctggtgtccacctgtaaaatgaaagtggtgtcccagagtctctccaaagctccttgtggtgactctatggtcctaagaaaccgttcactttataggcctatctcagtgcacagctgatgcctctgatgcaggggtggctgtggctgtgctgccgctcctatgggggaggcatcctggccagcacgctctttgcacctgatgactccctacggcagctgcacagcactgcagttagaagcccaggccacgtggatttcagccccggccctaccactcagtagctgtgtgaccctgggccaggtgtttgacctcccaaggcacccatttcctcatggaggtaataatagtatctataacctcagtttaccacacggatgaaaagacaatgcatgtaagggttcctccgcggcacctggctcagtgagcaatctgtaattgtgagctgttgtcattaagaggccgtgggaacactagtcggtggtgtgtatatccaggggtgggtgttgcttctggcatctctcctaaattcaagctgatgatgaaagtcatcagagagacagaacaaaataccccacaagctatgacaaaaggaacctgtatttcataaatcagagaagagtaaaggacagagaccaaagccaataactagtgtttaaacatgcagagagaaagagagacagagagagagatgtttcctctgccttccactaccatgggcaggtgggaaataccaccgaccctggggaccctgggatggtccctgagtgggccgtgtgccaggagcctggccagagagccaagagtggtcatggccccctgggagttctactcttttctaggcagcagcagtgactgagaccttgtacacaaaactcattcattcaatcagtatttatctaggacttccagaaacagtgctaagctgtgctggagagtgatagtaaaaaagacacagtccctaccagcgagagacattgggtccagctgatgagtaagacaagccaacagagtagggcaacaagaccaggatcccttcggggcattactgagcacacggcctcggtctggaattctggacacattcttcaccttaactgggggtgcattggggatttaaaacccccaagagccagggatctttcccacccaagctaatttctgggcagctgtgccactgcagggcatgcagaaggaagagagccttccagaggaaagtcgccttgttccttgctttgtgaccctcatctctgcgaggtagagaagaaaaggagggctcttccatcgggagcttccaaggttccgggtgagagctagccagctctgcatttggagcagagagaggtaagcggcccaagcctgctgagcctgcgaggtgcttcgggaagggccactctggaaagcattatttatagatctgactgtttgcccactcttatcttgaagacaggaatttgggacactaggtcacaagttggtctcttcctttgtcagcagtccattcaacatggcaatgcccacacccacctcacaaggcatggatgacacaaagagatggcttgcctgcaagagacccagctggtctggagttggaggcacacttcatttctctgcccagctcggcaggcggctggagcaaaccaggagatcgcctcaaatgttttaaatgtcaatatggtcccttcttgctggcttgccaagatttgaccagctaaattggcctgtgtggtgtgttccctgcagtgcacggtacgaatttagatctttcatcaatgctgtaagggaggctggacagccgtcaacagcagcatgcaaattcccagggatgctgttctgaaggcttccacctccatcttgagagctacttcctgtctctttggggcttcagtttccataaaggccctcattgaacccttgggccctaattggattggggaagagaccagtcccatttgggagaccacagtgccttcagcacccttggcaaacttcttgggtgctgcagtcctgcctaatgccagccttctagcaaggcctagggcgggtctgtcattcccacagtgtcatatgtgccaggggacaacctaaattgtgagctacactcacctagactaccagagggcttcacttgctcagtcattactcagccagccgggccacgtggactattttctactgactttgcctctctcccatcacagggaggcaagtgagagagtaggaaggcgttgttcttctctagcatggtccactgtcaggaggggaacaccagcccagcatgaggagagtgacctgggggccgagggtgatttttttctttctttctttctttttgagacagagtttcactgttgcccaggctggaatgcagtggcacgatctcagcccactgcaacctccgcctcccgagttcaagtgattcttgtgcctcagcctcccgagtagctgggaccacagctgtgcaccaccacgcctggataatttttgtatttcagtagagatggggtttcaccatgttgtccaggctggtctcgaactcctgacctcaggggatctgcccgcctcgacctcccgaagtgtgaggattataggcaggagccacctcgcctggccccgagggtgctttagttttagaatcttctcattataggtgtggttgaatgtttctgggacccaagctgtcaccaggagctggccccgtcatgacaaaataattcaccccttccaatctacccttccccagatgagataaaaatgactgggcatccagattaatgactggatcacatgcaggaacgtactggctgtgagcagccctgggccagggcagaggtgaacttgacaatcatgtggacgctggcttttgattactgcttcttctgggctcacgctacccagggctctctttagaccatctctaggtgaactttctgccccaggaatgatcacctccattttactggtgagaggttcaaggacttcccttccttctttcctcccttccccttctctccacttccttctccttccctcctacatcatttttccctttcctttcttcctcccttcctttagcaaatagccctggagcagctgaccggttctaggagctgagaacagggtgatgggtaagagggacaagggcttgctctcacggtgtttacattctagtgggggcaggagacaagtcaacagatcaataatttcagataagaacagctgctctaagaagaacaactggggagtgagatgcagtccactttaggccggtggttggggacggcttctcttgagaggtggcatttaggggactaaatggtaacaatgagctggccttgggcaggtctgggggcagagccatcagtgccagggcacagagctaggaaatgcagagcagctggtacccacgactggtcttgcctgaacccctaatccttgctctttctgccacatcctgctttcccacttggccaaagaattgtggttggccaaaggtggggctaagctgtgcagtgggaggggccaggctgagctggaggtggccaggagcctcctggtacagggccctggtgccagtgtcctcaccctcccagaatcctgttcatttgtgttgaggacatggggtgaaggatctgaaaatgcatgcgcaggcagacgacccacccaggccattcacagccgcagcagtttgggactctccgcttggcccaggtagggaggcacttgcggtccttcccaggcctgccgtgaggctccagggccagcgcctatccccagccccaaggaggcactccgaagaacctattttaaatctcagctcagcatttttggccaacttacagagaagctgcaagatgagtaaaggaacttgcctatattttttatctagatttaccagttgttgacatttgcccatctgctttgtcattggtgctctctctattctgtgtgtgtgtgtgtgtgtgtgtgtgtgtgtgtgtgtgtgtgtgtgtgtttgtgtttgttttgagatggagtctccctcttgttacccaggcgcgatctcggctcattgcaaccaccacctcccgggttcaagcaattctcctgcctcagcctcccaagtagctgggattataggcaccggccaccacgcccggctaattttttgtatttttagtagagacgaggtttcaccatgttggccaggctggtctcaagctcctgacctcaggtgatccgcctgcctcagcctcccaatatgctgggatgacaggtgtgagccaccgcgtccggccttcccacatatttttttctgaaccatttgagagtccattggagaccttgtgccctttctgcctgcatactttggggtagtgtgttttccctgagatcaaggacaagatcttacacaacaaccacagtgcaatggccagaatcaggatgtttaacatcaatccaatactgttgtctaacccacagtccagatgccgttttctcagtctcctcaataatgctctttataactcacttctcttttctgttccaagagcaaaggatcctgcgctcattctgcgccctctccctctggtctcctttgcgctgggcaggaccttggcctctctctgtgttctttcaccttggcttctgaagagtacgcatctgggatttcttcgtggttggattcgggcgctgcgttctggcgggaaaaccgctggaatgacactacggacttctgggtgcggcttctcagtgttgggaggcccacgatggcagtttggcccatgattggtaacactggctttgatccttccaatgtgatttttttttaacttttattttaagttcaggggtacaagtgcaggtttgttacgtaggtaaacttgcggcgtggaggtttgtggcataaattatttcatcacccaggtattttttttttcttttttgagacggagtctcgctctgttgcccaggctggagtgcagtggcccgatctccactcactgcaagctctgcctcccgggttcacgccattctcctgcctcagcctctcgtgtagctgggactacaggcgcacgccaccatgcccagctaattttttgtatttttagtagagacagggtttcatcgtgttagccaggatggtctcgatctcctgacctcgtgatccgcccgcctcagccttccagagtgctgggattacaggcttcagccaccgtgcccagcctcacccaggtattaaacctagtacccattagctgtttttcttgatcctctccttcctcccaccctccaccctccaaaagacttccgtgtgtgttgttcctttctatgtgtccatgtgttctcatcatttaactcccacttataagtaagaacatgtggtgtttggttttctgttcctgcgttagtttgctgaggacaatggcctccagctccatccatgtccctgcaaaggacgtgatctctttctttctttttttttttttagatggagtttcaatctgtcacccaggctagagcacagtggcacaatcttggctcactgcaacctctgtctccaggattcaggtgattctcgtgcctcggcctcctgaaaagctgtgactacaggtgcacaccaacacgcctggctaatttttgtaattttttttttttttttttgtgagatggagtctcgctgtgtcgcccaggctggagttcagtggcgccatctcggctcactgcaagctccgcctcccgggttcacaccattgtcctgccccagcctcccaagtagctgggactacaggcacccgccaccacaccaggctcattttttgtatttttagtagagatggggtttcaccgtgttagccaggatggtctcgatctcctgacctcgtgatcgcccgcctcggcctcccagagtgctgggattacaggcgtgagccaccgcgcctggcctaattttgtaattttagtagagatggggtttcatcatgttggccaggctgatttcgaactcctggtctcaggtgatcctcccgcctcagcctcccaaagtatggggattacaggcgtgagccgccgcacctggcccacgtcgttcttttttatggctgcccagtgcggtgtttttgattcgcaccatttcccgcctcctctgggcctttgtgtcttcctcgtcgttgtcctgggcaccccggtcatcctgggtgctcctcgcctgcttctgtctgtttctgttatgatgtttctctggtgtttggtccccgaccctttggcttcctgacctctgtttctgtctctgtctttatctctgctcttctcttggtttcctctctccctgctgccgccttctcccttgattttatccctgtctcatccctttcttattctctctccaaaacactgaaatgtccatgactgcaagtgccacatggatcaaccaccaggttaacctacagctaaagactgcaaggtgcaccctctggttctcacttctttcctaagaggattaaaatggaagtgaggagagttccctctgcggagctggaccttggaggcctcatactctaccctaggcgagactcatccaggaactcatctccaggcccaggagaaagggctggcttcaggaccaagcattccataggaaagctcctctccctgccatctaactgccttctgcccacccataggtcctcttgcacaggagggcacacagacccctactcccctgtggacctagggctgaggttcgctgtggtttggctacagctgagcaaatactgtctgtctgcctgccaaggcagagtcaactcccagctctgaggttagcaggtttctcaccctttgaaggacggggcccacagcagccttcctctccacttggtggtcaccggattggaggaagaccagaccctcacatctttctgggttaggccccaaaccacagtctggagaatggaagccagaccacggccctctaacagccacacttgaccactcactcactgcttcggcattgaactttgaattatgttatcatcattcctattactatacctaattttatagctggtagacaggtaaacactgttcctgactggaactcagatatccacttgtgggcaaagaatggtctctcttgcccaacgatgatgtcttggcaatgacatcatcattgccaaggtgatgatgtcaatcattcaccttgatgttgacttttgtctttggggcctcactttccccattgtagaacaaagggcttggaatagaaaccccctggtccctctctgttctgagcttccaggagctatcactccaccatcaatgggccaaccctttcctctgggaggggcagatgacttacactccccgtggagctgaccctgcgccgtccctggtcttggttatgatgatgatttggtatgtttgtgtgtgtttccctcctggaccaacccctgggacttccgcccttctggttcctctgcaaacatttgttttcatcttagtctatggaacaagacatcactaaggaccagagtgatgcaaaagacaaaggggagaaacactcctggccaccctgtctagttcttcctgctgggccaggggctgcttagcaccgtctccagcctcaggccctcagcagtctcagggctcgccagctgcaggttagggagcagctcagaggttggcctaccttttctttgcctcttcaggtgacacagctcaggggatgtcagaaccaagggcctggagagctcacactccacccaaccctctccttttgcagatgaaaaacccaaggtccagaaaggggacgcaatggccatagcagcagcagagcagggactgaatcccaaggctgatgactttgacttcggtgctccagcattcgtcttccctggatttctcagctcgcaggctcgataactctcttctctccccagacttgttggcaggcaagaggaataactcatgtgagtcaaaagcaatttgcaaacataaataattttcaatgccaggagaggagacggtgggaagatgcatggaaggttgagaggaacacagccagccccaagtctccctcgccctgctgggcacttcctctttccacctcggcgctggtgggagagtcggagtgcgccataaacaaggcaggaaacggctatcatgatgctcacttccgctcttcctagaagggattctgctcggcaatctctccactccccaccccctgccatgcacaggattttgtactcccagctcctctggaggctcagaggaggagatggtcctgctgcactggcccagccttcctctacctggcttgtctttttccttgtcctcaaccccaaacagcaagtatcctaacaaagaatggatagtacactattatttttgtgacattcatctcagtgtcatattccaaaggagcttgacattaattgtcctgttcctaatttggacactggtttacgaaagtgtggtgaccactggagactgttctctgacagtgtaacaggtattcgcccctttccccagggtactaagactcacgtggccctgacagccagcacagtctcttaggaggttccggagggtggcagtgggaatgagcgtagagccgtgtcatttcggagggctgagtgcattccacacatcttcccaaagcccaccccaagaggctgtctaacgcagggggaaacaatgagaaaccagataccatggaattagcaaagaatttctcagatgaaacaggaaagggaggaaatccagaggggtttacattacacctggctcaggttgaaaggattcagggccagttgttggcaatattaaactccaggctgcgtttgaaagggtccttcactcgggcagccaaagagaggcgttcctgccaggataggttgcatcgctgcagatctccagccctacgtgcatacacacgtgcacacacacgtgtacacacacgtgcacacacatgtatgcacacacatgtatgcacacacatgcatgcacacacatgtatgcacacacatgcatgcacacacacgcacacacatgcacacatgcatgcatacatgcacacacgcgcgcacacgtgtgcacgcacatgcatgcacacagacacgcacacgcacacacatgcatgcacacacgcacacacatgcacacacacgcacacacgcatgcacacacacacatgcatgcacacacgtgcatcttggatatctcttgttaatgtcagccctctgccccaaactagatttgaaaacttgtaggtaatcaagttttctggttaagagaaataatcccagccaacagttagtaagctcttatgtgtcaggccttatccaaacagttcacacgaagaccagatccaaaaataaaagtgtgctttgtcctctgtgtgttgctgtgtgtgtgtggggggggggtcacatgcacacccacatctctgccaccctgagttgcgtgttaaagctgcctacgtaagggtaaagtggttgccatgctgttagaaacgtgtaacatgtgtctgggcatgatggctcatgcctggaatcccacgaatttggggggctgaggcaggtgaatcacttgagctcaggagctcgagaccagtctaaccaacatggcaaaaccccatatctactaaaaatacaaaaattagcagggcatggtggtgggcacctgtaatcctagctactcgggaggctgaggcaggagaatcactcgaacccgggaggtggaggttgtggtgagccgagattgcgccattgcactccagcctgggcaacaagagcgaaactccgtctcaaaaaaaaaaataaagaaaagaaaaaaatgtataacaggtaccactaggctaaatacagaaattcaaccatgagcctctggaacttactccaggattatccttagggtctgtttccccaaattcaattactacataattacctggagtctcctgaaattctcaccaatggatcaggtggagagccagggggcagcaggaccccagagcagctgagcgtgcacatgtctgctctgcccatggtggggagagagggaacagcctctgggatgagagggatgagtctcctaaatgctggggctcctgggggcagccctgggccctgggtttgtgggtgatgttaacggcttgcagagcaggaactggcttctctgcctgaaagccccagtctctctctctctctctctctctctcacacacacacacacacacacacacacacacacacacacagttctatacagacacaaggcattggattctgaggtttctatttaagaactgtgcaggagctgagggagtgcagaggacaccaagacacactgttttcctttcaggagctccaggctctgtctagttggagaatccaggcccatatgcatatatgggtgttggaatgtgcaattgattgacaatgagtagtgggcgggggtggggggcagtaaacagtgaatacatcaataattcagcagagcaggccctggtaaaggctggaataatctagaacaacctcagggaggggatggggcctgagctggcctctgaaggactcacaggaccctggaaattgggagcaggacggaccctgagaggcggatgatgctagctctaaatccttctttcctcattgactggctgtttgaccttgggcaggttactcaaggcctccatattgccacctgtgagagagggacaatgacattccccacctcaccagatgtgaggatttaatgagataattcccctaaagtgcttggcacatagtaagctcaatcaatgttaactgttatcatttactgcaaagggaagagaggagcaggaggagggagttgggggtgtggtggctgcaggaagtagacacttgtgtccaagaataacaaccttcagtaggatttcctctgcccagcagtcaccttctcagaggagcagccaccagaacacagagccagagaatacgcttatttggagaagaaagaagatttgattttgtccaagtgcaggcttgccaatttgcggcttgtcctaactctcctgtcccaatgtcactcttagggacccaggataaagttggggaggctgaggctgaggtttcagatccacagataatccccccagcaggaactgagggaagaaggcagagagctttagagagggggagaggggtcaggagagttctttagagagggggagaggggtcaggagagttctttagaggtaaatatgactgtgtgtccatgcctcagtcaaactaagactccaggccagaaatcgttagaagacatttagatctgacacaagatgtttaatgttccctggtgaaaaaataacctgtgtgtttacttagggagttttccaggagtgcttaaggttctctcccaacccaattcatcttcaccatcttggctcatcctttaaggtaaccaagaaatggagctgtggacaggtaaaggttctctggtgaggggagttggtgcaccagccatctcccttgtttgctctagaagtttgctgtttggtgctggcgggagtcggggaggagcccaatgtgggtcaaatggcagagggacccattctggtctcccccacttctctgggttgtatcgcatgcacagagaacctgagaactcccacccagcccccactaaataccaggtgaggaccctaccatcatgcagtcatccagcaattgttctatgcctgacaacatacagtatcataaccacagtggcaggacaggtggctttcagcttcccatgccttctctctcctactggactagaacatccctgtgggcagggactgaccctgttgacgactcaggaccaaaatacggcttccagataaaatccaggatggccaactagagtctgaattttacataaacaacacatcctttttttaaaaaagtagaaatatgtctccagcatttcatgggacaacttccactaaaagattatgcattgtgcatctgaaattcaaatttcactgggcgccctagatttttatttgctcagtctgccaacactggacccaaagcaccctggatctgtggatctcctctccgctggacccagtgggatccagggatggagcaaacgctaaagggccgaacttggctcttctgcaaatgagctgggggaggggcaggctgcacggagaccagagactggggcggggctggggtaggcagggctcgcttttcaggggtggatacacaagtgctcctctctctgcctgggtgagctccagcctgaatgctggaggttcagccccattagaaagattcattttgaggaaaaataaagaccgtgggcttgctagtgtgcagggttaagacctagcaccctgctttccttctcttccctgagcttgggctcaaagagaggttttactaccctttgcttgtgggcactgagggacatccagggttaggaagaggccgtctacacccagaagaactggggcacctggactctccccaccccaaagaccctttgaggagaaaccctcctgtccctggcccccttggagcatttccaaacccttaacaccttcgaaagcctgtgtccaagaggccctggggcaggtggccatggcgtgtctccctgcaggtggtggagcagccagctgggctctagaatgagcatggaacctgggcaggctgtctgcctatcaggacctcagactctcctcccacagggaagcccaacccctgtggggactgaattgaacaagagtcacaagcccagtggcacctgacatgtctcagaagggtcagcaaatgtccctttcgtctagggacagagggggtctcggaccctctagggacagagggggtctcggacactctagggacagagggggtctcggacactctaggggcagagggggtctcggacactaggggcagagggggtcttgggcactctgttgggtctggcaccaggctgatatcccagcagctcttcctgacccacccgtggcctctgcccgttgtctgccttctgacctcaggcttcaggctctgcccaggaccacccttctccactcgagggctctgctagcaggcctggttttgaaggcctcaggccacctgcaggccacacctttccaggaatggtagtggaacggtttccttccctgttctgcgggagtgccaccctctacctcccctctcccacccccagacccagccaggcagaagccacccacagggtgggggacaccaccaagggctaagggtcactctggtcaccaactgtgggcctgaacaagaggcttcccttcccctcccgagtcttcagttctcctcagctagaaaaacagggagacgacgtccacgcctggcatgggcctttgtgtaccagccggtgaaggacaggcccaattctcgtgcccagcaggcagtttgccagaagcaagatcaccctccttccacccccggggtggcaaaggacattcattccgtggagggggaggggactgtgtaactcactctaaatggggctggggtgaccggggagtgggagggaccactcacaaaagccagggctagaaactcccaacggcttttttttaaagaacttcccttccccctcccctccccatgctgggctcccctcccccacgtccagccgctggtggcctgcagccaacactggccacactgtccgcattcaggcctccccgccctcctggccctcatctctccccagccttccccacactggctctctcgccacctcgccaccccccaccactctgaaccacgttgacctcttccgccctggcgccccgcacagacccgggccccttggtcccaggcgggcaggggaagggcttcggaggccgggagcagccccgcgcccgccaggcccccagccccgcggtccctggccctgtgcggccacctcaaccaggaggaagatcgctgcgtctgcagaaagctggccaccgccgccgcgttcccgggtcgcggcttcctggcccgctgagccgcaccccggagttcggcccagtcccgtcgccccctctgggaccttaaccccttcctcccccgcgacaccaagggccttggccttgccaccctaagggagaagggtgaggagtcccagctctcctcgctaaggaagtgggggtggcaggcctcgctcccccgccctcctccccgtccccatccatctcgcaggaagccccccgccccccaccccggcagcgctcgccgcgcctctagtgggagcctctggcctggtggtttccggggagagagcccgaagagcaagggcctcggcagcttcctcagtggggcagggccggcgatgccagccagggacgccggagaggctgggggtccccgccccgcggaacctgccctaccgggcgcgattattaagaaggaacctccctgccccgccagggcttgcgcctgggtgtgttgagccccaggggtggaggctacgggggaggagagccaaaggtcagccgctgcccagtgggtgccgcgagggagactagccccacccgcgtgtccgcgccgcccacccctgcaccccctcctcccctacccagaacccagggtttgccagtgccttgggcaccgccggccggaaagccctgggggcggggacggctcccacacccacccccccgcaggaattccccttcccagccgggcgcctctcgacttcccagggagcggggtcaccctcctgcgccggcgccgcggcccgcaaaaccagcccacttcgctggtgcaaaggttcagcacagggctcgaaggcggagttggtggcgagaggggtccgctcatctcaaacagcgaaaatgcaccttcaacatctccatttaatatttacattcaagcaggtaatagttggaagcttatagtttagacatttctagtagcagcagtttctagagagctcgtgtagccttttaacaaacttttttttttttttttttttgcacatagaaacaagacatccatgtgtacagtatcaaaaaatatataccaaggttactggtattgcagttcgtggaaggggaagagaggggagaaaatgaaatcaaccgaaatactggatggaggggaagaaaggtcaaaagaaaatagtttgtctgatatagaatataacatgatctagaggaaactccataaatctaggtttttatatttcaatatataaatacctacaaataaatatatatatagcagcccgaaggggggtggtcgggccttttgagctcaaacaatacatttcaataataacaccacgtacaaacgggagtagagtcagcacttgacaagttagcacggttaaaatataatactagaactctgaggccgggcgcagagctgccctgtccgttccgggggtccatctccagcggggaagggcaggagagggcgagccccgccggcaccgcgtggaaggggcctccgcccaggtctgacagccgccgcagggggaacatggttacctccgctccgggcgtcctcaccctgggggccagcctgggtctctcgcggttggcgggttggcgagaggggagcccgccccgaggccccaggtgctcagctccccgcccccccgcgggaatggcgcttccccttccgacgccctccggctacaccgtcacgtactccttgaaagtaacggtgaggcagttcgcggtgacgtcggtgataattatattcccaaagaagggcttgaactcgctcagcgactctgcaggttcgtcctgggcctcggctggaggcttctccgccgtcgtggtgggtgccgctgccgccgccaccgccaccgccgccgacgccggtgtctcgggcttcacctggagggagctgggcggctccccggcctcgctgcgcgtcttgacgcagcgcaagtctatgggttcatccaggtctgagtctagcaggatgacctcgggctgcgggagggcggcggctggtggcaggtcggccgggcgctcagcggctgggctgccccccaggcaggtgggggtgctgatgctgcgcgcagtcagccgcttcttgcagggctcgcgctcgccgtgggtctcggagaggcagcgcttgcgcacgtgggagagattcaggccgacggcgtggtggtggtggtggtggtggtggtggtggtgatgggggtgcgggtgcgggtggtgtgagggcgggtgcgtgttccgggccgggtcccaggcaagcaggtcgggcttggtggtgagctgcaggggctgctctccaaaggcctccttggtcggggacagcttgcgggagccggcatcctggggctgcggatcgctaaccccggacacctcctcctccctcctcttgggcggcgcctccaccttcttctcctctgcgcccgccgcctttttaaaagtcctgtcggcaggagggtggcgctcgtcggctgcccgcttcttgtggctgggggagcgagcctccccctctgccacctcgccggacttgatcttcaccgcctgcatgccgttctccatgtatttgctcatcacgatcacgatgcgtccgttcttgttcttgttcttgactatcttcatcttgcccccaatcccgttgcccgtcacagcctctttgggggccggcatcattccgttgggggggcccttctcggagcctttgcctggagcacccgccgcaccggccaggggcttcaccgcccccaggtagcctttggcccccgcaccttgcgcccacttgtcgggcgggtggctcttggcccccaggtccgggcaggtggggctgggcgcctccttgtggccgccctggtactgcaggtcgtacattttggggtcgggctggtaggggtggtgcttcttgctgttgagctggtagtagtacttgccgctcttgcccggcggcgggggcttgcccgcccgctccttgctgtgcggctggtactggtggtgcttcttgctgttgagctcgtactgatgcccctggcccttcccctgcgcgcccaaatccagcttggcacggttgtcagtggaggagtcctggaggccggtcaggacattggaacgacgggcaaaggtaggcacctgagggaacgggtgcaggggtgagaggagggaggagacagccccaccgcatgccgggagtttctggagcgtcccagcccccaccaggtccgcagctgcctcatggggggcaggaggtgggaggtctagtagaaagggaacagggtcagggtgctgggaggaaccaccaccaccccccccatccccaggcctggaggcagctctggtggccatgtcaagggggtgcccaggggcggccgtgtgtattcacctgcaccactagcggtttgggcttcggccctctcttccgatatcccatcagctgctcctgccgttccctgggtgggagggaacagagggcagtgctgttagcctcagggtcgccccctacccgctaattccggaatcttctgtgatgcccccccccccgcttcagagagcatcaggtagggctggccggacacaggaatcaagagttcagggcaggtcaggcctctgcgcccttaaccctcacaccaaccctcctctgcccaagaggtcctgggcaaagggctcccccactttgatgcccacacccgaaccagcacccccccaagccccacctctgtgctcaggaggcagaagctcagggctgcacctctggccctcctgcccacggccttgggcctgtggctctgtgcgaagcaaagtggacacggggatccagggaagacaaaccagcccaagcgaggtgtgcgccgacctcatccctcccgtcagaagcgcgggatgctaatgacctcattaagattccgataacgagtgcctccggcagaagggagggccctttcttaaaggccaggcactaaacagggggaggggctgcgcccttgtttacacagcggcaaatgagccaattaggggctgggggcgggggcgggccaccaaggccagggtgtggccaggtttgtggccacctggtgaacgctgcgctcctcccagctgagcaggtgggcgtggccggagcagcttagagaagcaccgcctcctcctcggagtctggctcctggctgcctcaatttccaaataatgaataaagcccatgggcggaggcaccggtcactacagccaccaggctcctgcctgcaggccagcctaagggtgatccacagctgggggctggatcttcccaggcactacccagccctccacggacgagtgggatgcctctctagtgtctgccaaagttgcagcccattcctgggccggaaacgggttcctcacagaccctagctaccacccccatgcctccttggaccaaccctggggagttctgacatgccccagggcgggggccggggcctgactctgaagttgcgtggcattgcgacagcctgcgttttaattcttcagggacccattatgcaacgtggcatcagccgctgacatggttacagggtggtgaactcccaggtggaatggggcaggatcccagctacgtgccccccctgcattgcgggagggcaactgccctgccccgccggtggctagctcagagggtctacagtttacagttttagcgccaaacgcgccacaggaaatagtgcaaaataaaagggggaggagagatggaaggcagcggggtggccgagctccaagggccccggctgctcctcccctcctcgcccttcccccttctaccctctccgaaacagagaaccacagccaccggcgacgaacccagctgcagcagctgcagcgtgacaagcaaccgtgcgcacgaggatgagtcccccagaagaagccacccctccaccaccaagcagcgcccaccccaggcccttgggccaagcccccctgccttgagggtgggtggccctgccctgccaaacagcccagtggggtccggggcggggggcaacccagcaccctatggaatctactcctgaccaagcttaaattccctggggtgtgcgggtgcagcttttaaggccatgtcaactttcctccagccgccaacaggttaagttcagttccatgacgtccgggcggtttcacaatgccagctccctcagagctgcaccgcgaggtgctggtgccaagcggccagtggctgcaggacagcaacacctaggctccgggggtggggctcccaggttgcaacaggaggggcccctggggaaccaggcacagccccaagttctccgggcagctgcatggccacccacacacacccttcccaaacttcccccaaaacccaagcctggccttccctggccttgccccgcccccaccccaagctgcagcaaccgccaaggacgctggttagaggagctggggccgcagcgtgcccatccaggccggttggggagggggctcccaccagccccctccacgcccctttcctattgctgcgtcgcccactttgccattcccatatacggtcacgggtggcaggcggtggctgcgtgggggacgctcacctgttctggaaggcgatcagcagcctggggtccaggatgttctcctccggttcccacgtgttatatcttgcaagggaaaagggagggggacacggtgtaaaaaaaaaaaaaaaagccacctttgccgcggcctccaggtggggagtgacataaggccctactctgtctttatgaacatttagccgtggatgtggaaggtagatttccgcaggcctgacgtagtccctgatacacagcccccccctcaaataaacacgcaagggcaggaagaaaggggaggggtaaggaaaatgaaactagcagtttattttgcagttgtcaagaattttaagcatgttactgcgacatgttccaaagccactttgctcaccaggaaccctgcgtgcaaagcagccgaaatgcaaagtcgcagtccccctcctctccccagccccgagtccccgcgagggcttcagccgttctccatttgacccctaatccgatagccaacagccaagcgtcccccccacaccccctcgtggcccaggagcccgctgtcacgggcgagcaaaccccaaatactcagcaacacaaaaatatgcctccgtgtgtgtgtgtgagtgtgcgtgtgcctgcgcgtctatctccatccggtgccttcgcatttcaaattaaagaaaaaaaattctccaccaaaagcgccgcagtgacagttcccaacattttctgcctttcttcttcccctccctgcaccactaggagggagaaggcacacaattgcattttcgtcgctttttaattttttttttttggttttgcaatatggagccgttcggtggagggaaaggggaaaggagccattttctgctgcacatcagtcagtgcctgcgccctccctccctccgccggcctccccggctcggccccgcgtctctccagctcctccggctccttttagtgcataaattagtgatggcatttcccggagagcggagcacaacacagggcgccgggctcgggctcggcggctcggcttccccagtgcctgccaccgacttccccaccccctcctccctccaccccacctccaccccgcctcccgtccgctccccccacccccccagcagctcggcgggtccgcggccccgagccccgcgcctcggcccccgggcccccgccctccgccgcgacttacttgggcgaccagcctctccatttcaccagatactccactctgccctggggggaagagacagcactccatcagcttccgcgggatccccggcccggcccgcagcctccccaccccctccccgcctcctcgcgggccgctccggccgccgctcgccgcccccgcgccgccctaccttgcggatccgcttcttctcgatgctctccaccgcgaagacgtgctcgccaacagctggcagctccatggccgagccggagcgcgccggggcgctggcggccggcgcggctgcagacgctgctagctcccgccggcgcccagctgccgccccggccgaagcgcccccgccgccgccgccgctcgccccgcacagcccggccggcccgccgctgcccgcgcccgccccggctcccggctcgcgctcgctcagacaactgagcccgggccgcggctgcacaagaactcatgcaaatcccggacgtcagcgggcggggcctcgccgggcccagctcggcgtcagggggcgggccgcggcgcggattggcgcagccgggcctaccggaggccccgggcctgggcggcggggggaggaggaaagggcgcgggtgggggacgcggaggggagggcgccggggaggtgcagggggagggatcggcgagcctgggagagggaggctgcagagagggagcgggaccgggaaggagaggtgtgtccgccggggcggaggcgggcggagagcttgacagcccggaagggtctcggcggcgacccctcgcccacatcccggtgcccgggcctccccctcgcggcacgttctcagtgttcacggccccgggacccctgctgggggccacggaagcatccgccgccgctcccagttgcaccgaattgcgtcaccagcgccccgggacgcgcgggccccgccggcagggggcggaatggggcaggggcagctcgcgccccactgcgggccccgcctcgcctccaggctccgggcattttggagcgcgaggagggaaagggacagggcggagagaaggccgaggactgggtgccaaggagagattgaagaacgcacgaggaaggggaccgaggagcagccaatcccggggccctggcgcccaagaacctcggcagaaagggctccaaatccgatcccaccccgatcctcaatggctccgaatttacacttggtcctcttattgacggggcgagatgtcctgtttctagcagcctccagagccaagctaggcgagaggcgtaggaggcagagagagcgggcgcgggaggccagggtccgcctgggggcctgaggggacttcgtggggtcccgggagtggcctagaaacagggagctgggagggccgggaagagcttgaggctgagcgggggacgaacgggcagcgcaaaggggagatgaacggaatggccgaggagccacgcattcgccttgtgtccgcggacccttgttcccgacaggcgaccaagccaaggccctccggactgacgcggcctgagcagcagcgagtgtgaagtttggcacctccggcggcgagacggcgcgttctggcgcgcggctcctgcgtccggctggtggagctgctgcgccctatgcggcctgccgagggcgccgccgagggcccgcgagctccgtggggtcggggtggggggacccgggagcggacagcgcggcccgaggggcaggggcaggggcgcgcctggcctggggtgtgtctgggccccggctccgggctcttgaaggaccgcgagcaggaggcttgcgcaatcccttggctgagcgtccacggagaaagaaaaagagcaaaagcagagcgagagtggagcgagggatgggggcgggcaaagagccatccgggtctccaccaccgccctgacacgcgacccggctgtctgttggggaccgcacgggggctcgggcgagcaggggagggaggagcctgcgcggggctcgtgttcgcccaggaatcccggagaagctcgaagacggtctggtgttgaacgcacacgtggactccatttcattaccaccttgcagctcttgcgccacggaggctgctgctgcccggcggctgctacccaccgagacccacgtggcccctccccaggggtgtaggggtgacggttgtcttctggtgacagcagaggtgttgggtttgcgactgatctctaacgagcttgaggcgcaaacctaggattccctgagtgttggggtgcggcgggggggcaagcaaggtgggacgacgcctgcctggtttccctgactagttgcggggggtgggggccggctctcaggggccaccagaagctgggtgggtgtacaggaaaatatttttctcctgccgtgtttggctttttcctggcatttttgcccagggcgaagaactgtcgcgcggggcagctccaccgcggagggagaggggtcgcgaggctggcgcgggaagcgctgtaggtggcagtcatccgtccacgccgcacaggccgtctgcgccgtcggaccatcgggaggtctgcagcaactttgtcccggccagtccccttgtccgggaaggggctgagcttcccgacactctaccctccccctcttgaaaatcccctggaaaatctgtttgcaatgggtgtttccgcggcgtccaggtctgggctgccgggggaggccgagcggctgctgcagcctccctgctgccaggggcgtcggactccgcttcgctcactacgcccaggcccctcaggggcccacgctcaggacttcggggccacacagcaggacccggtgccccgacgacgagtttgcgcaggacccgggctgggccagccgcggagctggggaggaaggggcgggggtcggtgcagcggatcttttctgttgctgcctgtgcggcggcaggaagcgtcttgaggctccccaagactacctgaggggccgcccaagcacttcagaagcccaaggagcccccggccacccccgctcctggcctttttgccaacgactttgaaagtgaaatgcacaagcaccagcaattgacttcccttccgtggttatttattttgtctttgtggatggtgggcagatggggagagaggcccctacctaacctcggtggctggtccctagaccacccctgccagccggtgtggggaggagctcaggtccgcgggagagcgaatgggcgccaggaggtgggacagaatcctgggaaggtacagcggacgccctggaagctcccctgatgccccagagggcccttcctgggaaacctcccgggggggtgccccataccatcccacccggctgtcttggcccctcccagggagccgcaggagaaactagccctacacctgggattcccagagccttctgctggggctcctgcccccgacttcggataaccagctccgcacaggtccccgagaagggccgctggcctgcttatttgatactgccccctcccagacaggggctggtcgagcccctggttctgctgccagactgaagccttccagacgccacctcggtttgggcccccagggccctcaggggccccaggagaggagagctgctatctagctcagccacaggctcgctcctggtgggggccaggctgaaggagtggaccctggagaggtcgggaaccttttaacagccgtgggctggagggtggctactaagtgttcggtctgggaagaggcatgacccgcaccatcccggggaaataaacgacttcttaagggaatcttctcgctgagcgggtgctctgggccaggagattgccaccgccagcccacggaacccagatttgggctctgccttgagcgggccgcctgtggcttcccgggtcgctcccccgactcagaaagctctcaagttggtatcgttttcccggccctcggaggtggattgcagatcaccgagaggggatttaccagtaaccactacagaatctacccgggctttaacaagcgctcatttctctcccttgtccttagaaaaacttcgcgctggcgttgatcatatcgtacttgtagcggcagcttaggggcagcggaactggtggggttgtgcgtgcagggggaggctgtgagggagccctgcactccgcccctccacccttctggaggagtggctttgtttctaagggtgcccccccaacccccgggtccccacttcaatgtttctgctctttgtcccaccgcccgtgaaagctcggctttcatttggtcggcgaagcctccgacgcccccgagtcccaccctagcgggccgcgcggcactgcagccgggggttcctgcggactggcccgacagggtgcgcggacggggacgcgggccccgagcaccgcgacgccagggtcctttggcagggcccaagcacccctcggggccacaccgccgcccgcagggccgcgcctccgcattgcggcacgctggggtcgcaggcgccgaagcgggacgcgctgttttctacgacgtccgtccctcccaacgtcagggcagccacctcaggcccgcccggagaagcccacccggcccccggcccccactcagtcgcgaggccccgccggcctggagatctgcgcccccgggatccatatttcaaatatgatctttggaacggcttccaccgcccgccgccgccgccgccgcgctcacaacggcctcggcgcactgtgtttttatttgggtttcgtttgctcaaggtcgccccgcggctctcccgtgcccctgaggttcaccccttcacgccagcccctgcgttttcctctcgggtgtccccgtcgcgcccccaaacccagcggggcccactcgcagggcagatttctttcttcctttttccaaccaagagctgctgcagcaaggcagggaatgaaataaaaatcgctaggcggaccccgaagtggtcgtcagccgaagcgcaactgcccccctccaactcgctcccctgcgcccctccccctcggctactcccctcccagctcccagcctcgcggcgcgccgagggttaagcgcgcgcgcgaggtgggggtatttggcttgggaggggggcgagaaaagggggcgccgagcgccgctggcggagaagctgggctcgctctagttccctctccccaaccccggagccgaggggcggcccgatcggaagggcccggcgcgtctccgcctccccggctggcctgcagcctggcctggccgcggcccggaaccgcgaggacgctgcttggaggccgcgtcctgcgtagcccgagagggggaggggggcggaggctccggagccgcggccgcgcgtcgcccgccagccgatcgatccccaaaggcgggagcgcggtgaaccccgccggacacctggggggtcccgatgcctctgcaggactgaggggcgaacggagaggggctcagggatcctgtggccgtgggatggcggccggcagggcccagccggaccgcagcttggcctgcactgcagggcgggtggtaacacctcgggcacccccaaaattccatattgtctgcatggggcccaggctttggacacttccggagccgagtccggtcgcagtgcaacttcatccctacctgtccagcccccaaccccacccccatccccgatgacgaggtcgtgggacgcggtcaccccagtctatctggtcgccccgccctcctgaatcctggtagaaatgttcgggtgtcccctcgaccccacctacgggaagataacccaggtgtgccctaaaagtccccttccccagcttcttccagaaggccgtttcctgaagtggtccctggggatggcccctgaggacctcccccagcccccccgagcccccaaccccagggatcccccttggctcctcgcctgccagtcccgggtgcccaggcagggcccgggcaggggcgcagaggagcttgcactcgccacgccctcccctagggggcgggctccccctggccggtccggcagcccctccgcgcctctcccgcaggggggaaggaggtccggacgcgggcaaagcgggggtctcgctgcaatgagagatggcctgaaaagccccgcacccccgcctcctgcacaccccgtcccttccccctccccacggcggccgggctgctgctttcgtagccagaaacaacccgctccaggggactttgaaccttgggagcccctgcgccctgagcacggaacaggccccaggggtgcgggctattgtccccgacgcgggcctcgtgctcggggcccttccactcccagcgggaagtccacacgagcagcacacacatatctttttatttgagagtttaaaaggaaatctgaggtccagaggatcacagagcctcttgttctgctatcaaaggaccaataagaagcaaactgatattacagggcaaatgttcccagacagcccagcctgctccccttaggaatgagtgtccctggagggggagagcctggaaccaaagccccgccaggaactgcttcccctaaactgaggttctctgaaaaaaatgttcgcctggctgataaagccgcctcttaacagagcccagacacttctgtgcttcccctgggttgctaattgaggacactaaagccctaagagataccccaggtcgggggaaggggccccaagacctagacctccggtggcgaccatgcccttgagaggatgggagctgaattggagcacgagattatttatcatcgctggatgaagctccagctagagctcagtatttcctctttttctgggctcagacagacacagactggaaggaatcctgtccgtgtggctgtgggagtgttcagttgataaagggcatgtgtggtgcaggggtggggccagccctgtgctcttctgggtggggcccctctccatcaggcccaggaggctccgtgcagggcccatgaaaatgttctagtaaaaaagaattgtttattttaaaaattgtggtaaaatacatataacatgaaatgaaccattttaaccaattttcaggctcaattcagtggcatatgcacattcatgttgtagtgggaccatcacaactgctagaactttttcatcttcccaaactgaaactctgtcttcattaaacaccagctccctctcttagaccctggcagcctgcattctaccttctgtctctatgaatttgactactctggggacctcatctgagtgaactcacacagaatttgtccattgtgactggcttatttcactcagcacaatgtcatcaaggttcatccatgctgtagcaggagtcagaagttccatcctctctcttttttctttttttgttttttgaggtggagttttgctcgttgcccaggctggagtgcaatggtgcgatctcagctcacggaaacttctgcctcccgggttcaaacgattctcctgcctcagcctcctgggtagctgggattacaggcatgcgccactacgcccagctaattttgaatttttagtagagacggggtttctccatgttggtcaggctgatctcgaactcccaacctcaggtgatccgcccgcctcagcctcccaaagtgctgggattacatgcgtgagccaccgtgcccggcccacccatcctttttctttaagccaatatctccagggaatttccattcttttaaaggctgaataatattccattgtgtgtatatataatttattttaaaatcagaagaaactggctgggcacagtggctcatgcctttaatcccagcactttgggacaccgaagcccgttgattgcttgagctcatccatgagttgaactcatccttgagttcaaggccagcctgggcaacatgaggaaacccccatctctaaacaaaatatgaaaattagctgggcatggtggtgcaaacctgtagtcccagctgcttgggaggctgaggtggaaggatctcttgagcccaagaggtggaggttgcagggagccgaaatcatgccactgcatgtccagcctggtgacaggacaagaccctgtctcaaaaaaacaagactatttttttttaaatttttatttatttatttttgagatggagtctcgctctgtcgcctaggctagagtgcagtgacatgatctctcctctctgcaacctccccctcttgggttcaagcaattctcctgcctcaggcccccaagtagctgggactacaggcatgcgccaccctgcccagctggtttttgtatttttagtaaagacaggatttcgccatgttggccagcctggtctcgaactcctgacctcaagcgatctgcccgccttggcctcccaaagtgctaggattacaggtgtgagccactgcgcccagccaaaacccagaatattttaatatataatattaatgtgttcatcccaacaaagctataaaatgtaattctacttattttattttatttttttgggcacggactttcattcttgtcacccaggctggagtgcaatggtgcagtcttggctcattgcaacctccgcctcccaggctcaagtgattctcctgcctcagcctcccaagtagctgggattacaggcatccaccaccacacctggctaattttttttttgtattttcagtagagacggggtttcgccatgttggccaggctggtctccaactcctgacctcaggtgattcctgcagcctcccaaagtgctggtattacaggcgtgagccactgcgcccagcctatacaatgtaattttaaataactttctatggaggaaggggtccatgaaagtgagggtgcagtcccgcttctgggggaggtttcaagaatggcacctctgaggagacctcacaagtcaggaccaccagcttccttgtggacgccttcagtgaaatcagctgttggccctagactgatggccgtggtggcccagagtccacctgcccctgtgccctgggacacgaggacaaccttgggccacttctcctcactattgaatgctggcttctgtttatttgactaaaacaaagagcatgtcaaagtaacagggagaagggggaataaacacacaagcctacctttctctcgtggttttattccgagttaattccgtggggctctgaaccagctccagtactatggatttctcccggatgtccatctggcctgtgtcagggagttgattgccctatgatttgacagtaatgatgataatggggtgattttgtattctttgactcattcagatcggaaggttcagaaatagacccatgtcctccacccccaaccccttgcttgaaactagtcttttgattctaacgaaatggcaggatcttatggatgaactgccacagagaaaggacccttctctttttgaagctattggggatgactggggtttatctttttagcctggagaccaagagttagtaccatagaagccgataactattgcacaaaaccagagaaaatactgccacagaagcctaggtgggagagaagtctttctcggaattttgaaaaacagccacagctgtatgtacacggagcgatctgaggatagctcactcccacactctgctgatgtcactttttcatcttcttcttggttacccacgggcaaagatacgttctcatttgcactaagcctgacttctgccttctttccccagataggccctggcaggcaggcagacggacagatgggtgcagacgcaatgctagaggtgttaagcaattggaccaagggcaacttggcccctgacaatgtctcacttgcttctcagcctgacccaggggagccacatctgccttctgatgtgcacgtcgcaggaattaccaagaaacactgtgttctgctgtggcacctgtgtgtgtcctggaggacaagtcccagctctggggcagctctggttttccagaaaggaaaggtcagtgttgacggacgcagcctgccgagctggcgcaggctgctccagggcgacatagattgtaccgccatcatttttcatgtcgctcattagcagtctgattaggggtgatgcacgtccgtgatttcccctcagctcagaccctccaatcctgcagaggtgtcgctggacctgagggtttgtatatcccaccctccagagcagactagggatgaaatacatcatctacctctgcaacccctgccccaggtaaacgagctttatcgtcaggtcctgggactgagggtgaggcacagaggaggagactccctcactgcagagtggcagtggggctgagagttgggcggggaggagtccctgcaccttctgctggtgcatgcatggcctggtcccttcgtcgggggtcatgcacagtctgggagagggtggagatatgtctttaagaccaaagggacaccaggaggtagaatcactcacagaggagccaggctccaggttgccaaggtgaacttgtcaatagagtattgaacaggctggtccaactggccataattgtctatttcaaaacagccaggctctggtcctcctcgcacggcccagaggcccacaggcaggaccctagctgggcagaaatatctgggagaatgagcaatgggctcccaagacagaacccaccagcatccccacccgtcccgaaggcacatgggtctgaaacctaagaaaactaagaaaggtttctttcctccctcacttctaccccggcttatgactcaaggtgacacaaagaacatcccagctccccagaacctgtcccttttttatccagaggactctgcctggagggaccccctcgtgagagtttcccaattccctgtgagccccagacaagggtggtggggcctttcgcttcacagggcaaaatgaaaatgtggggctccttgattaataattattaacaatttcaaggtgttggaccatgccacccacctggggccattctgatctcagggccccatgggtctgtgcaggtcccatgtgacaggccctgtcccctcctctggcagctcactggtctctgctggctttccgtggctgtgatttggctcctgtctcgtttctgcttccctctgggtcctttggcttccagtgccccctcccccaacagaccagctcattccagcaaccagagtcctcccaggctgagagctgtcccgttaatcctcgtcatccctgttgggggaaactagtggtggccccagggtcaggtgtccagctgtagtcaggatgagcaggctcacgtggctgagggcggaggaggaggggcctggagcaggctttctgagctgaggcctcatcagtccccaagcctgctggggtgccccagtagtggtgtttgcatgctcggtcaccctcctcccagctacactacacgcaccctttcttttccttttttttttttctttttttgagacagagactccctctgtcactcaggctggagtgcagtggcacagtcttggctcactgcaacctccgcctcccaggttcgagcaattctcctgccttagccttctgagtagctgggattacaagcgtgcaccacatgcccagctaaatttttttttttttgtatttttagtagagaaggggtttcaccatgttgcccaggctgttctcgaactcctggcctcaggtgatctgcccgcctcggcctcccagagtgctgggattataggcatgagccaccacacccagccccttttcctcttcatcccattaaggttgcacctccccaggtcaccagcagctgagcaacttactcatgtgggaggaatgcccctgcaagtggggtgcaccccagtgacttgcgtgtcagactagatgtgactcatctacttgtcctagacagccttgtcttcagcttcgtgtgggagcctctatgggccttgggtcctaatacctagtagagtctctgttcctcccagcttgccccgtgagccacccaggcagaggtccagatccacggggactgacctgacagaactcttggccatggccagttaggactgttgagacaagtaggagctggggcgctgcacacctgctgactgtccctctgccatgtggaagcaggagcatggtgtggtaagagccagacggacccaggcttctccccgctctcccgccggccaccggcgtgactccgagcaccagtgtattcatctgcaaaggggagaggagactttctaggctcaacaccctaagaagtcctctgacatccaaggccctgcctcatgtgtccccgtgacctcctggctttcttttccacccctctctcccttatacactctgttctgggcacacgggctcctccactaatcctcaaacactgacttggtgttgcctcagggcctttgaactgactgtagccaccacttggaatgttctttctccaataactgcatggttctttttcactcaagtctttactcaaatgtcatctttgtaatgagctggccctgaccacctgatcactacggtcccagccctgtccccaccaacactcccaatctccttattcctgcttacatagcaccctcacctccttacagacagtatcctctggatgttgatggtgtttccagcctgcatctcctgttggaacataagagctgcaagcgtcggggcgtgtccacacccttgtccgacgtgtccctggcatctggcacagtgcccagcacgtacctgtcagatgaatgttgaattaataggatttgtgtgaggaccgagtgagctcacacagccagatgaagctggtccacccgtacgggctggcaagagccgttggccacattctcagacattttgtgaacccgttgttgaacccagccatgattacaaattaaatgattggcatttacaattaaattatgtaaagaacaacaataataaatgctcactactgactccttcctagtgatttcctcagattcacatgttcccgggttctttgtgtcccctgtgtgtggtggaaaacgccacgcaggggcagctgctgctgcacatctcggcccaattctgccttcagcgctgtcctaatggtagcttgaagccagctatggctggagcttttactcaacagaaattggtaaacacgacaaatcgtgacttgattttttcttttgttgattgtctatactttagaaagtgatagaaaaaaaaaaaagaaagtgatgaaaaagtgttaatcatgcagattaaacttaaaagtgtgtcctgttggctgggcacgatggctcacgcctgcaatcccagcactttgggaggccaaggcgggcagatcacttgaggtcaggagttcgagaccagcctggtcaacatggtgaaaccccgtctctactacaaatacaaaaattagccgggtgtggtagcgtggtagcgggcgcctgtaatcccagctactcaggaggctgaggcaggagaattgcttgaacccaggaggcggaggttgcagtgagcccagattgcaccactgcactccagcctgggtgacaatagcgagactccatctcaaaaaacaaaacaaaacaaacaaaaaagtgtgtcctgtttgtagccattatgttcttttgttccttcttttcttcttcttcttctttttttcttttttttttttatacagggtctcactgtgtcacccaggctggagggcagcggcaaaattttggctcactgtgatctgcaactctcgggctcaagcaatcctcccacctcagcctcccaattagctgggactacaagcgtgcacttccatgcctggctaatatttttgtattttttagtacagacgggtttttgctgtgttgtccaggctggtctcaaactcctgggctcaagtgatccagtggcctcggtctctcaaagtggtgggactacaggcatgagccaccacacccagcccattatgttcctaagagcacaggaatggaggaagtagtattaaaaaactattccctgatttatgaaagaagttcctgacatcattatgaacgagaagtttgacctattccttcgttgtttcactttcgttttactggttaacttaaatgaaaatacccacagccattcaagtcagaaccacactcatttatcaaaggcaagcctgggctggcaactgatcccagagtttggcaaaaaagcaacaaaaaccttctgtgaatccatcagtatatggagcttacaatgaagagtatcttctattttattatttgtttatttattttattttatttttttgagatggagtttccctcttgctgcccaggctggagtgcaacggtgtgatctcagctcactgcaacctctgcctgccaggttcaagtgattctcccgtctcagcctcctgagtagctgggaataccggcatatgccaccatgcctggctaattttgtattgttagcagagacggggtttctccgtgttggtcaggctggtcttgaactcctgacctcaggtgatctgcccgcctcggcctcccaaagtgatgggattacagccgtgagtcaccgtgactggcctattttattatttgtgaatggcgtgctatgcatcctttatatctgtaatatttatttatttatgaaaaaaaaatattttaagaacggagtctcgctctgtcgcccaggctggagtgcagtggtgcgatctttgttcagggcatcctccacctcctgggttcaagcgattctcctgtctcagcctcccattaggtgggattacaggcactcaccaccatgcctggctaattttttgtatttttagtagagatagggtttcaccatattggccaggctggtctcaaactcctgaccttaagtgatcctcccaccttggcctcccaaagtgctgggattacaggtgtgagccaccgcgccctgcctatcagtaatatttacaataaataaataaataaataaataaatatacatgcatgcatacatttctttttttcagagagccaattgttaatgctaaacatttactagcatctcatacaagcaccagcccagaggaggcatttagattactgtaaacaaatgagagatgtttaattaggcagggctgagggaattaattcaactccatagatagccaaccccaaagaaggctaggagacaggaggcctgaccaggccaagggcgcaagtggtaagaaccaggtgtcagtagggcagggaccacagcgtgttcgacagggtcatgacgaaaggtgcagcccagtcctgaggatggtgaccttggccttttgggacagtatctttagctcatacttctgggacaaggtgttccttcctgtgggctgcacgcatgcccagagctccaagcccctaggcattgtccaaaggctgagggccacatgcccctggacgcatgccccgttatccttggggttgcctgatgctgctgcctgctctccattctcccagctgtttagggactgaccatgtctatgctgccaccatctatatctgctcaacccaaggaggggctgatctaaccctggccctgactctcctcttgctgctgggaaagaattgtccttttttaagtttattttttaagtgtgtttgcagaaagcacgctttaggtttagtggtcagggaaggctcactgaggaaggagtgtgtggcttgtcatctctaggttggggaggagctgggacagcaggtgccaaggccctgaggtaggcacctcctgagtgtgtttgaggaccagaaggaaggcaggagcagtgggcagcgtgggctgggggagtggggtcagatggcagactgaagaaggaggaaggcagtttgcctgagtgtctgtgactcggagtttggacttgagtctcattgttatggcaaagctttggaggttttaagcaaggaagtggggggaccagataacggggtcagacccagaccctggggccacagggcaattcctgggactagaggaggagctgtgggatcagcagggactgggggtagagagccaccatgccactgccctccccagagggcgttctcctgcaacaggtcagcttcttcgaggcaatgtagaagcaacatgtctccctcaaaggagtgtgaatttaaagactcgaaggccgaagacggagatgccggcagccaggttgcatagctctgtgttctggctgggccatttattcactctttgaccttgagcaactgatttcacccccctgtgcctcagtttctccatcctgaaatcgaggctcatgatgaagtggttggtggtcacggaggttaactggattaataggcaaagcacttagcactgtatccagcgagagtgagtgcacaacacatggaagctattactgttatttttattgttgttattatcgctattaggacagagaaacacccggggcagccaagcccaggccaggatgcctgagcacactgccctgttggcagagcgggtggggatcctggaccaaggctcatgggttggagcctgtcggggtaaatcctctccaaggcctggctctgctccctgccagctggactgagctgcacacgctgccgcgtctctggggcagtaggtgttacgtgtagtccagccaaaggttccagagctggaggaggtggacatctggggccacagagccctggggccctcgggacttggggccccagtgctgccactgctaacccattggtgcccctcactccccgccagccttgatggtgaccctggggaataggcatcggaaggctttggtccttagttcagggttgaccctctgctgggtctgtttattcccaggaagtcctcagtgcagatagaaaggctgggcttggtggaggcaccgggattggagctgagcacaaacactgctgggggcagggtcctctctgagaagcagagtcgggatgtgggggtgtgcgctgtgtacttggggcctttggctcactgcgtgtgaagaggagattttaacgcccacccggtgcccgccttggacacacagcttgggaggctcggctgggcagttctgggcagcaaggtgaggggtcaaggggaccacaagagaggaaccagggtgccatccagctcctggggagccaccggctggattgtgtcgatggctggaaacccacctgggccatgtggtcaggatggcagcgtgttgtgatcacacagcctgtacctcattttgagaggagcgtcttatgcccccacttcagagggggaaactgaagctgtgacttttgtgcaaagtggcagcagagctcggacgcaaacccagggttgccagccctgggcacgtgccctgggccctctcacttcgagctggacagcagctccccccgcttctcttccattccctgaccctgatgagtcctcgggggtggtgggggaagtgcagtgcgatttggagtgaattaaacagacacaagtccccattgtctcagaatttactctgtgtgtgtgtgtgtgtgtgtgtgtgtgtgtgtgtgtgtgtgtgttttctggagacgggtctcaccatgttgcccaggctggtctcaaactcctggcctcaagtgatcctcctgcctctgcctctcaaaggtctggaattacagatgtaagccactgtgcccagtctcagggtttgcagttttagaagatagaagctggtgcaggtagtgtgggctgaggactgcctttaggcggctcgttcaccaaacactggactgagctgagcgcctggtgaacacattcctatcttatccgcacaaacactgcatgaggttgtcctaattatcctcagctttgcagaggaaactgaggcccagagagttgagcaatgagcaagagggcatgaggggtggatatttgtaaagagtgggacagtgtggattttgggagccacagggcgaatcctaatgcattgaatacttgcctcccccaaatatttgtctacctggaacgtcagaatgtgacttatttggaacaagggtctttgtagatgtgattaaggtgcagatcttgagaggagatcgccctggattggagtgggtcctgaatccaatggtagaagagactgaagaggggaggacacgcagggacattctcctggcatctgaagcagaagccagggaagacggaggcagaggatggagcgatgcagccacaggcccagaaacgccaggcaggagtccctcctggggactctgcaggtagcacagccctgatgacaccttgatttaggacttctggacttcagaaccaggagagaatccatctctgctgtttgaagctctccaggttgggatggagccagggcttgcccctgaggcctcgtttcttcctgtccctgtgcggctcggctgcctgcccagcctggatcctggtgtaaaagtcccgcatccttttctttcttgtgagacagagtctcactctgtttgtcgcccaagctggtgtgcagtggctcgatcttggctcactgcaacttccacctcccaggttcaagcaattttcctgcctcagcctcctgagtagctgggattataggtgcccaccaccacgcctggctaatttttgtatttttagtagagacagggtttcgccatgttggccagactggtcttgaactcctgacctcaggtaatctgtctgcctcggcctcccaaagtgctgggattacaggcatgagccactgcgcccaccctcacattcttttcttattatttcctgagcacctactatgggccaggtgctgtgatgtttcctcatttaatctccattcaatgtgaaatcgtcactgttatccatgctatagaagaaagaacacctcacatggccctgacctggccctgagaatgtggggaggacacacagaatggggactcctctcccaggagctgctgttggcctctgctggggctcgcccagggctctccggaaaaacagacctgataggatacatggaggctctaagaggggacccccgtgggaattcgctcacacactatggaggctgagaggttgcagggccagccatctgcaaggtggggaaccagggaagccagccatgatgttcagtctgagtctgaaggccctagaagcaggagctctcgtgtctgagggcagctggaggtggatggtccaggtcaagcagacccagtgcagtagcctgctcccagccttcctgttctactcaggccctcgaggcttggctaatgttgcctacattggtgaggtgcggtctacaaatccaagtgggaaccactttcggaaacaccctcgcagactcagccctgtcaagctgacacatgaaattaaccatctcatcatcaaaatgcccctgaacgtgcaagatacaatggggaaacaagcagatcactcaatggacccagcatggtgccattaaaatccctgcagttcactgggcacagtggcttacgcctgtaatcccagcactttgggaggccgaggtgggaggatcgcttgagcctaggagtttgagaccagcctgggcaacataaggagactgtttctaaaacaaaataaaacataacataaaaactctttgccgggcacggtggctcacacctgtaatcccggcacttcgggaggccaaggcaggtggatcacttgaggtcaggagtttgagaccagcctggtgaaaccccacctctactaaaaatacaaaaattagtgaggtgtggtggtgggcacctgtaatcccagctactcgggaggctgaggcaggagaatcgcttgaacctgggagatggaggttgcagtgagcctagatggggtcactgcactccagcctgggtgacagagcaagactccgcctcaaaataaataaataaataaataaataaataaataaataaataaataaaactctcatagtccccgctaaacacacatgaaatttctggaaggacaaagctccgtggctgttcctagtcctgccctgggtccagccatcatctctgagtgtctggattggggtgggtgccacagctctacctttcctccactgatctgccccatcttatcactcattccctctcaagctgcccggttcccttgtctgggcaccagagaccttctcctggcacccgcctcctgcctgggacttcctcttcagcctcatgtctgttccctgtttccctgctcccctcggagaagctccatcgcagctgagcagcctccctgcaaccctccttatgggccctggcctgctcaggtggtgcccctgccctttcaggggagggagtgaggggaggacatgtacagagctcagctacatcccaggtagggcttgaagccctttacctgcaccctagctcttcccaggagccctcacgtttcttttctgaggcagagtcttgctcttttctcccaggctggagtgcaatagtgtgatagctcactgcagcctcgacccctaggctcaagtcatcctcccacctcagcattagctgggcatgggggcaggtgcctgtaatcccagatactcaggaggctgaggcaggagaatcgctcgaacctaggaggcagaggttgcagtgagccaagatcgcgccactgcactccagcctgggcaacagagggagactcggtctcaaaaaaaaaaaaagtataaaaattatacaatgaaatatttacattgtcattattgttgttctaagtcttggaaatccagtgtggatcttgtacttgacagcccctctccgccgggactcgctgaattccaagggccccataggcacacgtggctcttggcccccacagtggacagtaagcgtctgggacaggatggggtgactttcacatcccaggtggagcaaattcctctgggctctgaccggttagagctttatggtatgtccctcacagtcgtaggggcctgaggcagcatcggtggctggacttggtatcagtggtcatgtggtcatttatgtgcccagtgtggcaagcctggcaccagacctggcaagggggcttcatctgggcccaaaaaagtacagacagcgtggtctccagcctgcctcccggggaggcctccccaggtggacttagaaaaggaggtcagaggcgggatgggaggtggcctttgcaggcacctggaggggctgtggtgttgggtccctggatctggaaggtcacatcaataatgtgtcatctgctagtccggggccactgcaaaggctcccatcccaggagacggcagtttagcactggcctggaggctggctggcctggaggctggctggcctggaggctggctggcaggcgcagctggggcttgggtttcctctgggggaggctgcttcttccctcgtgcccgtccacgctttggttacaggcagtgaagccgctgatgtcagcgggaccgcggctgcccctctgaggtgtctgtggcctgccaccagagcagcgggcggggtggcctcccgcctgagcctgtttatcatttaagtggataccatgctctggcagctgagggtaattacgggggctgcgtccttgaggacgggtctgcgcatgtgcttctcgcggggctggtggcccagccggggcggcctcggtgccgtcagctgctcggtgagatgtgaagggccggggctccgcgtggggccttccgtgctgcagcagaggcctgggattggaatgcgaaatccctctgcggtggagacaggggctggtgggggtcatgccatcttcagggccgtcctgttggctctgacctcctgccaccagccacagactctgctccagggtgtccacctaccccagccgttcctcctcttgtctgcatccctctgtccctctcttccttctcttcctcctcccttcagtcgtgtttagcaagtcccattccctggcctcagcgtcccgatcctcccatcccttggctttgctggggcttttccaggctgcttctgcaagccttgtcattttgttgctgggatggcgccgggaggtggaatagagtgccccctgcccccacattcatgtccacccaggacctcagaatgtgaccttgtttagaaatagggtctttgcagatgtaaaatcaaattgagattaggtcatacgggattagggtgggcccttaattcaataaaactgatgtcttttttttttttttgagaccgagtcttactctgtcacccaggctggagtgcagtggcgcgatgccagcttactgcaacctccatctcccaggttcaagcaattctcgtgcctcagcctcccgagtagctgggactacaggcacctgccaccacacccagctaatttttgtgttttaagtagagacagggtttcaccatgttggccaggctggtctcgaactcctgacctcaggtgatccacctgcctcggcctcccaaagtgctgggattacagatgtgagccaccacgcctggccaaaactagtgtccttacaaaaagagaaaaacttggacagagagggaggaaggccaaaaggccaaatgaagatgaaggctgagatgggagggaggcagccacagctaaggtgtaccacgggttgccggcagccaccggaagccgaagaggcaggaaagatttgaccccagatcctcaaggcgagcctggccctattgccacctggattttggactctggcctccaggagcccaagacaataaacttccattgttgaaaccaactcgtgttggttatttgtgacggcagccccaggaactcatacagccccctcccctgggctcggccctgtgagcaataagagaatccccccagctgaccctgctcttggggcaccttcaagcctcagcaggctgttcctgaaatccagctgtgcagccaggatcggtgagcacacacacattttcagggataatggtcttcagaattccaaaggatttattggagctcgcccgacgtggaccacagccgagctgaaacccacacttgacaagtgatgcaatcagcgctcgactcttgccagcgttttcgggagattaggcagcagcaggggctggggtgcacaggagcaggcagacaggagcaggcgattgcagcagcatcaacacctgagtcgatgtgatggcgtggcgagtggccacagactctgggagccagccggggagcacagcgtgcccggcagaaggaggtgatgctggctgagcagaaaggtcaccaggtggggttgcagtggcctggacagccaggaggatgctctgtgggcagccagccgtggccagaggggaaggctgtgaacggggtggttagaagccacctgcactggagtcctggccacagtggggggtggtcctggatctcaggctcctctctgtatagggggccttacatggcccacctccagagcccgaggaggctgagtttggggaggacagtaagcccttggacttcctgttgctgcttggtgctgttgttaggagtctggaatgtgctggagctatagattgggtcactctctgcaaaaagcagaggaaggaggtgcaggaggtcaggggcagttcccgggggaatatctgaggaagggcagccatggaagagatggatggaggccagggagacggtcccagaggccacagcaatcacaggcttaaagacggggggagggtcagggagacccaagggtgggtcggagatgggccccagggactgaggaggggaacttggacagagaagtttcatagacagaaaagagcagacaggaagttatggagggttggggtcggattcatgcacacacacacacacacatgcccatataaatacacacacaccagcaaacacacgtgcatgcacgtgggcacacacacgaatacacacatgcacacacatatgcacaggcagcaagactgacgcttggccatgtcatgcaggctgtcagagaggagaggtgagtgaggggctgggtgggagggcggcaggggtcaagcagaggtgtgtgtatttcaggacagaagagacaagagttggaataaaaagaattgaagatgacggggaaccgggggtgcgaggagtttggatgcgggggcgtctgccttggaaaggtgcagagcctggcaggaaggagggcagatcaggtgccttgctctggagtgctaggaggggaagggggtctgagggggtgctcaccctggctgtggtcttttcagaaaagccaaagacaaggtcattgcgcagtgttcctaggggaggctggggctgcacgcagggtcagctggagattagggagcaatggctgctcagcagggaggctcggccagccagggcagaccctgcagagactgaggctgccccatcctaaccctgttcctggtgaagacctgcaagcggccacaaagcagtggctcaggacaagggcttggcctggcccgtgtccaggggctgagagcctgctgttcgttcagttgggctgaagtggcccaattccccttctcctctccctgcctgtttggagtcccaggatgccaacagagaggtctgagctgagcatgccggggagggtggtccatcacactctgtaaggtgtgaatttgcagagaggtgcgtggaggcatgctcactccattgtcatcacctctgggcagtggcgtctgatgagttttattttcttcctttctcttttgtggtttattttattttatttattgattcgagacagagtcttgccgtatcgtccaggctggagtgcagcggtgtgatctcggctcactgcaaactccgcctcccaggttcaagcgattctcgtgcctcagcctcccgactagctggattacaggcacgtgccaccatgcctggctaatgtttgtatttttagtagagatgaggttttaccatgttggccaggctggtctcgagcgcccgacctcaggtgatctgcccgcctcggcctcccaaagtgctggaattacaggcatgagccactgtgcctggcctcttttgtgattttaaatttagtttattgtcagggtgcggtggctcacacctgtaattccagcactttgggaggccgaggtgggcggatcagttgaggtcaggagtttgagaccagcctgaccaatatggtgaaaccctgtctctactaaaaatgcaaaaaaaaaaaaaaaaaaaaattagccgggcatggtggcgtgtgcctgtaatcccagctacttgggaggctgaggcaggagaatcccttgaacccaggaggcggaggttgcagtgagccgagattatgccaccgcactccagcctaggcaacaagagcgaaaacttcatctcaaaaaataaaataaaaaaaaataaatttagtttacaatcaccatgtacatttttttttttccaaaaataataaagccaggaagacctcctgcacaacgcccccattgtttgacttgagctgggggtggagcttctctgccttgcgctaactgtcacaagttctattagaggaatttcttctttgaggatcctgatgcaagagagctcagaggatggtacagcggacaccaacctgaatgcaacagccccccaagcccttccagctgaaactgtcccctctttgaaaaccacaggtgtcggccgggcatggtggctcacgcctgtaatcccagcactttggtaggctgaggcaggtggatcacctgaggtcaggagttcaagaccatcctgaccaacatggtgaaaccccgcctccactaaaaatacaaaaattagccaggcatggtggtgggtgcctgtaatcccagctactcaggaggctgtgccaggagaatcgctcgaacctaggaggtggaggttgcagtgagccgagattgcgccgttggactctagcctgggcaacagagcaagactcgtctcaagaaaaaaaaaagagagagaaaacgatacgtgtcctggtgacgactcctgcaccttccctgctagcctgccttgctctgccctgcctcctccctcctcctgctgtggcctctggagctcctctctcctggctcacccagggacgtcacccttgcctcttctctctgcgactcccaggcaaaggactttccgctcacaagcaaacatgtgctggcaggtctcttcctgtgatccctccaccctctatagctactgccccgatccctctgcttcctccagcttctcgtcaattcgcctgggcggcggggagtctgcgcttttgggatgtgattggtgctccccaggcgatcctcatttacagctagtggggacagccaccaagtcacagccttccagaaatttcacccatcctattgccttaaccaatggcaagctgataaatgtttaatagtcagctctggggcatggggacaaatagccctgatctgtatcattatgcagttcctatgatgtgactatttccaccatggccaatttcaagctgccaacaggaagagtactggctgtcaaaattcctgcaaattttacaacccaggacaattccatctgtgggtggcatctccctggagcctgggtctactctctgagttggctcacctgtccctctggaacctggttaggccatgggtgaaaatcagcttccatgcccactgcagagggaaggaaaggatgcttgcattgagtgactgctggagcagcaggggcttccccgctttacagttttacaaagcactgcaattatctcatgtaagactcaagtctaaagtgacgtggccaagaccacacagcaagcaggttctagagccagcctcagaccatccccaccgtgagtcccccgtgcgagtgccccttgaaggaggttttctaacaggtgagtggtctgattctgtctctgtcctgtgggatggatgggctggcacttgatggctctccttccccctcaccctccacggagaaggctggaaggtgcatttctcagacttccttgcctgggaaatgggaagtgatgcagaggatcccaacgtctcctcggcaggcttggtggtggacgtgctgggccatgttccaggggccagctgctggctccgtgggtgctgagaggaagggggaaggctgtctattttttggccaggatgaatccagcagatgtggtaggtcctggccgcttgctgacccgtgggtctaccgggtgctccggagctaatggtccccagatgctccaccgtcctgatgtggcagaggcatggcattttggcgggccagtttggtggcatcctgggaaccgttttggaggctcgaggtgcagcctgcttctccagcttttccagtgatttttctgagcttcttatttcatttctgccacaaggagccaaagtgccttctgttttctgcacctgagccctcactgatacgtcttttaaccttggtcacctccagtccttttgtcctgtaaccttcattcaagtcccaggcctccagttccatgatggggtgtgtcgggttttgtttgtttgtttgttttgagacagagtcttgctctgtcacccaggctggagtgcagtggcgtgatctcggctcacttcaagctccgcctcccgggttcacggcattctcctgcctcagcctcccaagtagctgggactacaggcgcccgccaccacacccggctaatttttcgtatttttagtagagacggggtttcactgtgttagccaggatggtctcgatctcctgacctcgtgatccgcccacctcggcctcccaaagtgctgggattacatgtgtgagtcaccgtgcctggcttaatttgtgtatttttagtgcagacggggtttctccatgttggtcaggctggtctcgaactcctgacttcaggtgactcgtccactccggcctcccaaagtgctgggattacaggagtgagccccttctcccggccccacacacaatcttaagaaccacacagcctttttgttggttcacggaggatgagaagggagatgtagaagtgagcatgactgttagggacaggcatgcagatagcagggagtagcaacagttgacagtgaggaggaaactgaaaactataaaaacaaaaccaagtgcaggaactcaaaagcataacctgggtggggctgggtccggaagcacagtgggggcccccggcctgttcccaagatcctgaagtcaccaccacctgggctcagtcctgaggcactattgaagccagtgcctcagatgcaccagagaaaggataacccatgggtgcagctagggaagctgccctcctggggtcctgcaaggacaggaggcgaggcctgaggctttcctcgtttcactcggccactcctgaacagtgcaaccacattttaacaagactcgccatgttagtgattgttttgatttttttttttatttttttatttttagacaaggtcttgctctgtcacccgggttggagtgctgtggcatgatctcggctcactgtagcctccacctcccaggctcaagtgatcctcccactgagcagctgtgactacagacacacgtcactatgcctggctaatttttgtatttttttccgtagagacagggtttcaccatgttgcccaggctgcttaaagtcctgagctcaagtgattcacccaccttggcctcccaaagtgctgggattacaggcgtgagccactgcaccaggcccctagtgattggttttaaatatattttttgtcataaagaaatacatatttactggaaaattcaaaaaggaagggagagagagaggggaagaaggaagaaaggaaggaaggaaaaaagaaagaggaagaaagaaaaaagagaaagaaagaaagaagaaagagaaagaaagaaagaagaaagaaagaaagaaagaaagaaagaaagaaagaaagaaagaaagaaagaaaagaaaagaaaagagagagagagaaaaaagaaggaagagagagaaaggccaattgcctataatcttatgacacagagacagacactgttaagctttggggatttccttccaatctttcttctgtctctatctcaggcttggttggtgtctatatccgggtcgttctctctatgtgaatacattaaatacattaaattttaaaaacattatcatttggccactcgcagtggctcacacctgtaatcctagtactttgggaggccaaggcagatggatcacttgagctcaggagttcgagaccagcctgggcaacatggtgaaaccctgtctctactaaaaaatacaaaaaaattagccatgcatggtggcatgtgtctgtggtcccagctactaggaaggctgaggtgagagaatcacttgagccagggaggcggaggttgcagtgagccaagatggtgccactgtactccagcctgggtgacagagggagacttcttctcaaaaacaaaacaaaaaacaaataatgatatcctgcttttcacttaactttgtatttttattttttgactcctctcatcaggtgatttgaaaaaacaaaagccgtggtgcagtggctcgcacctgtaatgtcagcactttgggaggatgagatgggagaatgacttgagcctgggagtttaagaccagcctgggcaacaaagtgagacccccatctctacaaaaaataaaaaatattagccggatgtggtggcatgcacctgtggtcccagctccatgggaggctgaggcaggaggatcacttgagcccaggagattgagaatgcagtgagctgtgttcatgccattgcactgcaacctgggcaacagagtgagactgtctcaaaaaaaaaaaaaaaaaaaaagaaaagaaagaaagaaaagaaaagaaaaaagagaaaaaccaaaaccccaactcaaactccagctgcttggcatctttcagtgaagatttctagattttgcaaataaaaatataaaacacccacgtaaatttgaatttcagataacaccctcccatgtaaatctgggacggacttatactaaaagacgatttgctgtgtgtctgacattcaaatgtaaccggcctgtgttttgcctggtgatgctcccctctggtgctgagtggcttcagatcctgggaggctgctggatccgggcggccggctcacacctggagggctgagtcccggctcacacctttccttcctcagccgtggataggtatccagtgactcctggcttgagccctgtgtccctcctacctgtcaggcaccaggcctggtgttttgtggtcattgtccgtttcactctcacgagagctgcgaccccattttgcagaaaaggaagaggagcttcaggctgaacaactgtccaggatttctgagccaggaagaggtttggggtccagatctgcctcactggggtcccctttgcttggatgcaagagaatcagaaggacgctaagccaggacagcaagcgtagcccaagaggctgtgaccacgcaccctccccagagagccccctccctgggatgccccctccctagaggcccttccccaggataacaggcctgggcctctggaccccaccgcagctgatgaaaagcccctgactgcccttggggttctgagcttttgaattgctggcaacggtgtcttctgagccctcagggcttatttaaaaggagttaaagtgccccagtccctggtgggagaggttaagtagcaggggtggaggattaagtgctggcttgggaatggggcggggcctttggaaagctctggaattggttgctcagtctcccagctctcctgcctctcccagaccaccccaccccctgccatccttttccctctggtcctcagcaaggtttttttgtttgtttgttttttgagatggagtctcactctgtcacccaggctggagtgcagtggcgtgatctcagctcaccacaacctctgcttcctgggttcaagtgattctcctgcctcagcctccggagtagctgggattacaggtgtgcgccaggacacctgtaatttttctttgtatttttagtagagatgggttttcaccacgttggccaggctggtctggaactcctgacctcaagtgatcttcctgccttggcctcccaaagtgctgagcttacaggcatgagccaccacgcctggcctcagcaaggttcttagacatagatgtacccacagatccctggcagagaggtagatactgagtgggtcagaaaggtccgggactttgcattcaaataggcacttggagattccaaggcagaaagcctgctcctgacacttcccctgaagcgctggtttctgagaccccatcacgtggctcaccctgggaaaggtggcagagaggtgacccctagacctcctccacctgcccttcctcctcccacttcccctcctttttccctccctcgcccccctccttcaaggaggtgcccgtcccttttctgaggttggaggtctcgggagaagcactgactgggtgggcccctcccaagggcctggtggcatctggaggccaagcctcctccttccccagcaactcctgaagaggcaggtggaggggtcaactccgtgagcccctgcccgtcccaccctctccccttgggcacaggcctggggaccccggggagtctcaaccttgggggcccagggcaggaagggccttcattagcctgggagacagagtagccacaaagttcagctccagccaggggccaacctgggacacaggagactgggccctgtcatctggggccacacatcttggaccggctgcagcagcccggggtttttaatccagggccctgaattaagctgtgttccgccgtgacgggtttgctaagtcctcggagccagaccacgttggctgctctgctgggaaaggggttctcggggtaagtgaggagcaggagaccagccaagccagcaccgcagcggcccagagccaggcgtgagaggccaggacgggagggctctgggggcagcaccgttgctttgggcctgagcagtgggtgggaggtggattcaggctgagctggggaggccgggaagggctcagacccaaggcgctacaggagggaagagaatgtgcccatctgccacgttggacagagtagaggccccactgcagcaagagggatctgggtaggatctggaggaggccttgcttcctggactgcatgtttctagaagtctccttgcagactgatggggttgaaggtgtgttcagaagcagctcccctttgtcccactcaggctgaagaaggagggacatgcaggctcagacaagtgcagcttacgatggcagcctgggtctggagacacgcctgcttggaggacgcgcggggtcttcgggaaggggcttggtgggtagctcactcctgaaggagtcaggcttcccgcaagctggtgagctgggccgccgcagcctccgcccctcgggcctggtgcaggccttgcctcggttccattctctgctgttgctgtcctgacgccctccgcacattttgaacaaggggccccacactctcattttgcactaggctccgcagattctgcctgctgggccagcccgggggaggcacctgtttcacatacttgcagaagccgtgtgcactgtgcaggtgcctcatctcgcagagggaggggctgagtcagggggctccttcctccaagctcaccagtcccaccaccagctggagtggggcctaacgtgtacccagggaaggccgcccactggaaggaaagaggggttggggcatggacagtccccacaccaaccgagcctgaagccattggggaggaggcagagagagcccagggggaccaggagcccggaggaggagtggggttcaaggcggaaccccaccggcctcggtgatccccgcttttcaccttgtgagcccctttcacaccctggccttcctttactgcattttctcccatttcacaggggggagaaacagacgctcggagggttacggttgggaaccccccaaaatgggtatgtggctggctggcttaacacctggtgtctggttcgaatagaaacaccaggatgctgcttgcagggagccgttcttgaacaggcctgggtggaatctcagattcatatttctaaaacctcctcagatttggggacttctatgtgaagtctttgccgaagtccacaccctggaagatgcagggaggatgaaaacgtgcccatctgcctctggcttttgattccagccccaccacagcacagctgccttcgaaaacacagggcaggagctttctgcagcagtggctggtgggacagacagatggacggacacacacacacaggcagcagaactggaggtgagggcagtcaggaggcagttatggtttggttcggtttctttcttttctttttttaaacaccagcttgaaagcttgaactagattttatttatttatttatttgagacaatcttgctgtgtcactcaggctgtagtgcagtggcatgatcacggctcactgcaggcttgacctcccaggctcaagcgattctcccacctcagcctcccgagtagctgggaccacaggcatatgccaccatacccagctaatccctcccctcccctctcctcccttcccctcccctcctgtcccctcccctctcgtctctttgtctccctcccctcccctgctttcccctcccctccctcccctcccctgctttcccctcctttcccatccccttccctctcctctcttctctcttttcgagactgggtctcactttgttgcttcggctggtgtcaaactcttgggctcaagcaatctgctcaccttggcctcccaaagtgctgagtaggttttgtttattttttaaattaacattttaatgttgagataattgtttatttacatgttgttgttgtaagaaataatacagaaggatctatgtcccctacccagagtcccacccatggtggtgtcttgtaagactagagtacaatgttacaaccaagacgtggatattgatccggtgaacccatcttactgacgtttcccttctgcttgtacccatttgtgtgtatttcctttctgtgacctgtgtagcttcctgtatccaccaccgcagtcacaacgctgaacgctgcggcaccccaaggacgccctggatcactcttttgcaactggaccgacctccttcctcttcctaatctgcctccaagtctccaagtctgttatttcaagaatcttatgtgaacggaatcatacaccttgtaaccttctgggagtggctttttccctcaaaatcattccctggagattcctgcaaggtcttgtgtggcccagtccggggttccttttcccgatccgtgacgtggaggcacgacagcatgtttagcattcgcccactgaaggtcaaccaggtgtttctggtttttggctattatgcataagctgctatgaacacttgtatgcagcttcttttattttttatttttattttttagagacagggtcttgctctgtcgcccaggctggagtgtagtggcacaatcacagctcactgtagcctcaaactcccaggctcaagtgatcctccccactcagccttctgagtagctgggactacaagtgtgcaccaccacgccctgctaatttttaaagtttttttatagagacagggtcttgctatgttgcctgggctgatcgcaaactcctgactgagtaatcctcccgcctcggcctcccagggtgttgggactataggcgtaatctaccacgcccagccttgtgtataggttttgatgtgaacaaaagcttccatttctctgggataaatggccaagagcacagttgctgggtcttatggcaattgtgtgtttagttttataagaaactgccaaattgttttccagaggggctgcaccatgtgacaggaccagtagcagtttctttttcttgtttttttcttttttttttttttcgagacggagttttgctctgtcgccgaggctggagtgcaatggcacgatcttggctcactgcaacttgtacctcctcagttcaagcaacactcctgcctcagcctcccgagtagctgggattatagacacccgccatcatgcccagctaatttttgtagagatagggtttcaccatgttggccaggctggttccgaactcctgacctcaggtgatccacccgccttggcctcccagagtgctgggattacaggcgtgagccaccacgcctggcccccggtagcattttctgagtgatcctatttctgtgcatccccaccagcatttggcgttgccactatttttaatttctgataggtgttgatggtatctcactgtggttctaatttgcattccccccatggctcatggtgttggacagcttttcatgtgctcacttgccatctgtatattctctttggtgaaatgtcaccattgaatttgaagcgagtttcttgtaaacagtgtatggttaggttgtttttcaaaaaatagactgccaatctcttgctttttacttggtgtatttcatttacctttaaagaaaattatcaatatgttaggacttaggtctgccatttaaggatttgttttctctgtgtatgttttcttgcttttctgtggattccttgaacattaggattgaggttcatcttggttgatttatagtcatctagagggcgtttctttgtatcacttccctagtggtcgctctggttattacaaggtacacgggtagcattttaccacctgcagtgaatgtggaagccttacttccatgtaggttctttaacctgtcccccttttattttcattttatgttatttttgagacagggtctcactttgttgcccaggctggagtgcagtggcacaatcacggctcaccgcagcctcaacctcctgttcttaagtgatcttcctgcctcagctgcctgagtaaccaggactacaggcacatgtcaccacacctggcctattgattgattgattgattgtagagatggggtctcactatgttgcctgggctggtctttaacacctgggctcaaaggattctcatgcttcagcctcccaaagtgctgggattacaggcgtgggccactgcaccccccaccacacctttttaaatatcattgtcttgaatatcagacagtgttagaatttttgcttcaatcattaaatttgatttataaagctcatgagaaggatcatctattgcagattcccatacacttgttctttccattattttttccttcttaatgctccaagattccattttattttattttattttatttattattatttgaaatagagtctctctccgtcgcccaggctggagtgcagtggcgtgatctcggctcgctgcagcctccgcctcccgggttccagcacttctcctgactcagcctcccgagtagctggcattacaggcatgtgccaccatgcccggctaatttttgtatttttagtagagacagggtttcaccatgttggccaggctggtcttgaactcctgacctcaggtgatccagccacctcagcatcccaaagtgctaggattacaggcatgagccaccacgcccagcccattttattttaaaaatcattttctttctttgtgaaaaaacttcctttagctgttctttaagggcaggtctgctagcaacaaattcgttcagaaaaaaaatagattttctattttttcatttgtttcaagagaacttgtaattgccactgaaatatttttaagccgctttaaaatctcagaatgtctttatttccccttcattcctgaaggatggttttgccagacatgattcgctgttggcaattctttgtttgcagcacttgcaaacactcaccttcacctggtctccgtggtttctgatgaggaatctatggtttgagtgggtgttcccctacagggaatgtatcattttgttctggcagctttcaacatattttttttctttagttttcagaagtttaattatcaggtgtctcagcatggatttctttgggtaactatctgggacttgctcagcttcttgaatgtgtagatttgtcatttggcaaatttcagaagttttaagccactcgttcttttaatactctttcagcctcattttttttttttttttttttttttttttgagtcagattctcgctctgtcgcccatgctggagtgcagtggcgccatctcagctcactgcaagctctgcctcctggtttcaagtgattctgctgccttagcgtccgagtagctgggattacaggcacatgccacctcgcctggctaatttttgtatttttagtagagacggggtttcatcatgttggccaggctggtttagaactcctgacctcaggtgatccacccgcctcagcctcccaaagtgctgggattacaggcgtgagccaccacaccaggcctcagcctctttctttttctcccctatttctgggtaactccaataatatgtatgttggatcttttgttctatcgttccacagatgcctgaggtactgttctttttctccccacaccagtatactttctgttgttcagtttgggtaaattctatccatctgttctgaagttcgctaattctgtcctctatgatcccattctaccatggagactgttcatttctgttattgtatttttcagtgctgtaatttatatcctgttcttgctgataactatttgctgagattttctattttttcatgtttcaagataacttagaattgcttgctaaagcatttttatgctgctctgaagtcctggccagatttttcctacatctgatttatcccggtgttggcattggttggttgtcttttctcattcaacctgtggccttttcaggccttggtatgatgggcgagtttttttttttattgtgtcctggacatttaagctgttacattaggaggctctgggctctcgtcaaatcttttggccagcgcggtggctcacacttgtaatctgagcactttgggaggctgaggcagaaggattgcttgagcccaggagttcaagactagtctgagcaacatagtgagactcccgtctctacaaaaaatttaaaaaattagccaggcgtggtggcatatatctgtagtcccagctactcaggaggctgagctgggaggatcacttgagcctgggaggtcgaggctgtagtgagctgtgatcgtgccactgcactccagcttgggccacagagtgagaccctgtctctaaaataataataataaataaaataaaataaaataaatcttttattttagtaggcagccactctgcttaggtttagcatgccggtcctgccctactgttactggctgtggtttccatgacaacctaattagcagaacctttttggtgttagtttggtcggcgtggttaatctggtgccatcggggctgctactggttcctgctggttcttcttaaggtggcagaaggagtgtctgtgggtgcttctaggtgggtgaagggagccgcagcccacagggacaaagaagacaaaggttcctcctgcaggtgacccctgcccctggcatctcttggtgggggaggggaggtttctctggccaagtctcagtagcggggtgatggggcccctgcttgttcctttgctggtgccactagcttaccacatgttgtggacgggactcctgtttaatctggggacacagaggaccctatctggcttgtctgtttttgctgggcctgggttcccttcctccacgaggtggagggccgtggcgctctgcctcactggggctcctccagtccgggggctctcacctgtcgactgtcttccatccacctctgcgttctccttgggttgtctcttgtgttatttccagggcttatggttgtactttgagaggggaggagcaggaagaaatgagcctagatcatcttgtctggaatgcaggttctgttttattttttaagaggggccatatggaagtaagtttggaagccagtgggaaggacctggtggaaggaaggctgaagatgcagccagagaagagaaactgaggacataatgctctcccggggccagggctgggctcattgctccatcaccagcacctcctacagtgcctatgggagctgcatacgtggttccggagtggaattgaccctgagcttgcgggtagaggttcctcctgtgagggcataagagggaaggagagtgggtttgatgatggtccggggggaggaggatggggaaggtctcctgatggctgacacatcctgatgctgacaaagccatgaaaagtgaggggtgctgggcctggggaactctgtgaacacaggggttaaatgacagagtgaatccaggcacagaatggtgcccatacccaccccaacgtcattgcctgggagctgacatcacctgcacctgccaggctgacaccagcgctccccagccccagggcctcctgtaatcaaggccttaggagtggagcctcagaagcaggaggagaaatcaattctcttccacgcgccaaaagctgctcattcaaaacaccccaaagacacatcaggtgggaggcacctgcactgaggctcctggaagctactgcagcaggacgtgggagcaaggcccggctccatttgtcccctgctggtacagccatttcatgggtggggagggtggagaccaggtgtgctggccagggattccagggcgtggggtgcagggtcccctgcgtttcctcatatggatgtcagaagtggaagagaacgtcatagcaggccaagtggggtccaaccctttccaaggtctggatcagctgtgctgtgcacccacagccctctgcctgccctctgctccacacctacccctccaggccctgattttcccgctggactgtgcccgggaacatgtcgttctctctattgtatgggtgtgtgtgtgagagaaagatgcacatatttgggtatatacatgatgtgtgaggcatgtatatgtgtgtatcatgtttaattttctcaatattcaaaaagcccacaaatttgataagaaacagataaacaactcaacagaaaaataggcataaatataaacaagtaattcatagaaaaggaaattcacatagtcaattgcacttaaaatatatgcaaaccctagtaaaatatgacattatttaaagatacagatacgatgaccaacattggttctagtgagcaaacatgaagcaatgtttagcctcatcaaaaggaaaatgcaaattaaggccatgaagtgatacattgttcgccctttaggttgctaaaatttaataaaagctctaagattcactgaggcaaaaaacctgggggaaatagacatggacatgcttggtggaaatgtgaatgcaattacttcctgggaaagtactctggcaatatctactaaaatgaaaataatacacataagctttgacccagtgattccactctggggaacctcttctttagaaacaaaaacaacggggtatgaaaatagatgtaaaagaattgcttttccagctgggtgcggtggctcatgcctgtaattccagcattttgggaggctgaggcaggtggatcacctgaggtcaggagttcgagaccagctaggccaacatggtgaaaccctgtttctactaaaaatacaaaattagctgggcatggtgtcacacacctgtaatcccagctactcaggaggctgaggcaggagaatcacttgagcccaggaggcggaggttacagtgagctgatatggccccactgcactccagcctggtcaacagagtgagactccacctcaaaaaaaaaaaaaaaaaaaagaatgctttttcggcactgtctatggtggtgaaaccaaagcaaaacaaaaaaaataaagaaattggaagtaatttgtgaatgcacatctttataagtatataattgtagcatatttagggcagccacagtggttgacacctgtaatcccagcactttgggaggccaaggcagaatgattacttgagcccaggagttcaagacaagcttgggcaacataatgcgatcccatctctataaataattttaaaaattagccagccattggccaggcatggtggctcatgtctgtaatcccagcagtttgggagggcaaggcaggtggatcacctgaggccaggagttcgagactagcctggccaacatggtgaaaccccttctccactaaaaatacaaaaatcagctggttgtggtttaggatacaggcccgtgcctgtaatcctagctactcgggagactgaggcaggagaatcgcttgaactagggaagtggaggttgagccaagattgtgccactgcactccagcctgggtgatagagcaagactttttctaaaaaaagaaaccaaaaacattagccaggcatggtggcatatgcctgtgatcccagctactagggaggctaaggcaggaggattgcctgagcctggtaggttgaggatgcagtgagctgtgatagcactgctgcgctctagcctgggcgacagagcaaaatgctctcaactgcccgcagcccccgttccccgacacacacaaattgtagcaaatttacacatggcagccttgaaatggaatgagttaaatctaggccaattaccatgaaaggggatgtccatcaaatatttgataaagaggggggaataccaaatagacactgtatgttatgatctccattttttaatatgaagcaagaaataatcctgctaccctccaccagtggggtatgaataggaggaatccatggaccagtcccaaactggctgctgaccctgaatgccttggagaagtgagattggagggaaggtgggaaaatggtgaacttttctttgtttatctttgcatggtttcacttgccaaagccgggaggtgttacttttttttttttttttttttttttttgagatggagtctctctctctctgtcacccaggctggagtgcagtggtgcgatcttggctcactgcaacctacgcctcccaggttcaagcgattcttctgcctcagcttactgagtagctgggactacaggcatatgccaccatgtccagctaatttttgtatttttagtagagacggggtttcaccatgttggccaggatggtctcaatctctcgaccttgtgatccgcctgcctcagcctcccaaagtgctgggattacaggtgtgagccaccacgcccggccagtgagccaccacacccagctgaggtgttactttttaaaaatagctctactgatgtataattttttttttttgagatggagtctcgagctctgttgcccaggctggagtgcagtggcatgatctagactccctgcaacctccgcctcccaggttcaagcgattcttgtgcctcagcctcactagtagctgagattacaggctagtagagatggggtttcaccatgttggccaggctggtctcgaactcctgaactcaggtgatctgcctcgacctcccaaagtgctgggattacaggtgtgagccaccacaccaggccatgatgtataattgagataacaaaaactcacaaatttaaaaggtatactttgataagttttgacatgcatacacccataaaactattaccccaatcagatagtaaacccgtccatcgctccccacatttcttctccctccatccctccctgcttccctgctccccagtcctgacctctggcaaccacactctgcttcccgtcagcatagattctttacattttgcagagttttgtataaatggaatcaacagtatggactctttttcatctggcctctttcacttggataattatactgagattcattcatgctgttggctttatgaatagatcatttatttttattgtacagtagtgttcaattgtatgcaaataacacagtttgttaatccatttacctgttgataagttgtttccagtcttcagctattacaaataaagctgctatgaatatttgtgtaccagtctttgtatggactttcatttcttacattcaggcattcatacatttcatatcctacatttcatacgttcatgaaatgtatactttcactcaaatacctagggatgaaatggctggaccacacaataggtgtatctttgactttttaagaaaccagcaaccttttccaaattcattgtaccattttgcattcccagcagcagtacatgagaattctatttcggccacgccctcgccaaacatttgatttcatcaatctttttactttagacatcttaattggtgggtagtggtatcatgttgtggttttaatctgcatctctctaacaactaatgattttcaacatctttttatcttcttattcgccatatgtatatgtatatatacatatatatatatatgacttctttgatgaagtatctattcaaatgttatgcctacttttttctttttttaagcaggtggggggttgttttcttatgattgagttatgagagttctttttatattctttatatatgtccttcatcggatgaattatttacaaatattttctcctagtttgtgtctttccattctcttctttcgaagagcagaagttttaactttttctttttaaaactaaaatagctttattgggatatacgtcatatactacacaattcacccatttacatgtacaactcaaagattttcaatatccaggtgacccttgaacaatattcattttaacaacatgggccacttatacacagatttccttccacctctgctccccgtgagacagaaagatcaacccctcctcctcctcctcctcaatgggaagaccatgaggatgaaggcctttaggatgatccacttccacttaatgaacagtaaatatgctttcttttccttatgattttcttaataacattttctttcctctagcttatagtaagaatccagtatataatacatataacatgcaaaatatgtgtgaatcaactgtttatctgtaaggcttttgaacaacagtaagctcttagtagttaagttttgggggagtcaaaagttatacgtggatttttgactgcagggagtcagtgcctctaacccccgtgttgttcaagggtcaacttgtattaacagatatgtgcaaacatcaccactgtcaacattagaacatcttcatcacccccacaaatcatcttatatgcattagcagtcctgccccattttctcctacccccacccccacccccagccctaggcaacctctaatgaatatttttaattttgataactccatgtattaggctgtcttgcattgctataaagaagaggttgggtaatttataaagaggtttaactggcttacagttctgaaggctgtacaagcatggtgccaacatcgcttggattctggggaggcctcatggctgccggtgaagtggcagcaggtgtgtcctgtggcaagatcaggagtgagagagagtgggaggggggtggtactctcttttcaacaaccagatctcccgagaactctcactatcaaacagcggcaaggagatggcgctaaaccattcatgagaaatccatccccatgacccagttagctcacaccaggccccacgtccaatactggggattacatttcaacaggagatatggcaggggcatgtgttcaaaccatatcaccccaagttatcaagtttttcttttacggatctcacatttggtgttgtttctaagacatctttgccaaactcaaggtcagaacatttctctcatatttttcccccagaagttttgtagtttttgaatttacatattataggtcaatgatccgttttgaattaatttttgggtgaggtgcgtggcatggattaaaggtctctttttgcccgtgaatatccacatgccccattggatgaagacgtcatcctttctccactgaattgctcttggaccttgatctgattgggctctgtgtccccacccaaatctcatcttgaattgtactcccataattcctatgtgttgtgggagggacccggtgggagataattgaatcatgggggtggcttccaccatactgttctcatggtagagaataagtctcacgagatctgatggttttatcaggggtttccacttctgcgtcttcctcattctctgtttgcctgctgccatccatgtaagacgggactccttcctccttgcctttcgccatgattgtgaggctccccaagccacgtggaactgtaagtccaattaaacccctttgatttgtagattgcccagtctcaggtatatctttatcagcagcatgaaaatgaactcatacataccattatcagaaagaatcagtttttcacgtatgtacaaatctgttctgttccaccagcctatttggccatctttgcactaataccctacagccttgagtactgaagccttctagtaagtcttgatattggatagtttagctctccaactatgtgcttctttttcaaagttattttggctagtctaggtctttttatacttttatatgaattgtagaatcagcttctaaatttctaccaaaaggaaaaaaatcctgctggggctcatgcctgtaatctcagcactttgggaggctgaggagggtggatcacttgagcccaggagttcaagaccagcccaggccaacatagcaaaatcccagctctaccaaaaaaaaaaaaaaaaaaaaaaaaaaaaacagttagctgggcttggtggcacttgcctgtactcccagctactcaggaggctgaggtaggaggatcacctgagtttggaaggttgtggctatagtgagctgtgatcacatcactgcactccagcttgggtgaccctgtttttttaattaaaaaaaaaaaaagcctgctgggattttttgaatcaataagtaaatttggggggaggtaatatcataacaatattgaatcttctaagctgtgaacaggacacctgtttccatttatttagatctttagtttctataagcaatggtttgtagtttcccatgaacaaatcttagttcccttgtgccagatccatccttgagtgtttcatatttttggtgctattataaatgatatttttaaacatttcaaatttctaattgttgctggtatctagaatacaattttttttattatttttatttttatttttttttgagatggagtcttgctctgtcgcccaggctggagtgcagtggtgcgacctcggctcactgcaagctcctcctcccaggttcacaccattctcctgcctcagcctcccaagtagctgggactacaagcgcccgtcaccacgcctgtctaattttttgtatttttagtagagatggggtttcaccgtgttagccaggatggtctcgatctcctgacctcatgattcgcccgcctcagccacccaaaatgctgggattacaggtgtgagccaccgcgcctggcctagaatacaattaatttttacatatggatatttgtttatttatttgagacagagtctctgtctgtgcagtggcgcgatctcggctcactgcagtcttcacctcctgggttcaaacgattctcatgcctcagcctcctgagtagctgggattacagatacgcaccaccacgcccggctaatttttgtgtttttagtagagacagggttttgccatgttggccaggctgctctcgaactcctgacctcaagtgatctgcccaccttggcctcccaaagtgctgggattacaggcatgagccactgcacccggccatattgatatttatcctgaaaacttgctaaacccacttactagtttctagcagtttctttgtaggttctgtttcattttcaacatagatgatattgtccacagagaaggaccattttactttttcctttccagtggagatgcttttttttcttccttttttcacaggctagaacccccagtaccatgctcaacagaaggtgagagcaggcattcttgtattggttctaatctttgggggaaagtatttagtttttcaccatttattgtgatgtttaaggtgcatttttctcacatgccctttatcaaattgagaaagttcccttctcttcctagtttgctgagagtttattttagtcatgaatggatgttaaattttgtcaaatgtttatttctggctgggcacggtggctcacgcctgtaatctcggcactttgggaggccaaggcaggtggatcacctgaggtcaggagttctagaccagcctggctaacatcgtgaaaccccatctctactaaaaatacaaaattaaccaggtgtggtggcgcgcacctgtaatcccagctattcaggaggctgaggcaggagaattgcttgaacccaggatgcagagtttgcagtgagtggagatcgtgtcactgcactccagcctgggcaacagagtgagactttatctcaaaaaaaaaaataaataaaataaacaaaatcaaggtaatgcgtgcatacagattttctaaaatagtgcaatagcttccttggcttccttttccctcttctgaacctgttctccagagacagctgctcttcagggcccttagctctttgtggacttagttctggccattgcctccacatcttcagatggcaaacgcatgcaaccccccatttgatggatattgacccagggcctcctgtgtgtcaggcactgtcccaggcccttgtgaaactccagaaacaaaacaggcaaagatccctcccctctgggagctgatataggggactgacctcatcctggagcaaacataattcccgcaggggcagatggacaacaactgataaacaccataaacccgtgagtggggtgcacctgagaatgcaggaagcactttggaaaaaaaatagcacagggtaaggggagaatcaggagtgccaggaagaggggtacgagctaaagtaggctggccagggaacactgagctgaggagacgtttaagccaaggcttacaggagaggaggggctagctacatggaggtgtggggggacaggagcgggtgttccaggcagaggccccaaggcaggagtgtgtctgctgtgttcaggaatagcaaggaggctggtgggctggaggggaccctggagtcagagatgaggaggaatgaggagaggaggctggggggctggaggggaccctggagtcagagatgaggaggaatgaggagaggaggctggggggctggaggggaccctggagtcagagatgatgaggaggaatgaggagaggcgccccatcacttagggtcttggaggcaattgtaaggacttcagtttttttgttttgttttgtgttttgtttttttatcagagaaaaatgaggagtgcttgctagattctgagcagagaagtggcatgtgctgacttgggcttttacaggaccgctctggcttctctattgaggatggttctcgggcagaagtagggacgctggttaggaggccagtgcattaatccaggcgagagatggcagctgcctgggaccaatggaggggactaagaagggtgggttctgaatcatggagcaatactgagggtagaggcgacagcacttgttgatagattggatgtgaagagaaaaagagagaatcaaagacactccaagttttatttgctggagcaactggaaggacggagttgacaaaaattagggtggggcagctgcggagggaggtcagatgtccagtctgcggggtgcggaggtgggtggccccctcgatggtctagctgggatatcgtccattttaattggatgcggtccactggagttgggagcatggtttgggctagaggtgtgacctaaagagctgatgacaggaagatgctatttagtgccatgggactgagtgcgatcaccactcatctcttatctctgcatccatgtggacccgttatctcttcctgctgtgatggcggagcagcaaacccagtcccatcctgctccttccaatacaggaggaccattacttttatttatttattttattttttttaacttttttttttttcccgaaacagggtgtcactctgttgcccggggtggagtgcagtggcgcaatcacagctcactacagcctctactgctggggttcaaattgtcctcctgcctcagcctcccaagtagctgggaccacaggtgcacaccaccctgcctggttaatgtttttcttttttgtagaggtggggtcgcacttggttgcccaggctggtctcaagtgcgcacttggttgcccaggctgagctcgagtgatccgcccacctcggcctcccaaagtgctgggattgcaggcgtgaaccaccgcacccagctgggcggcccaggacttttagctgccgcttgcttcacgaaactttgctacaaccccatctcagaagccacagaagacactgtcccagcgtctctcagctgactctcctctgggttgtgaggatatgagggtccctgccccgcccctcggggcttccctccgccccactctcgccctctgcatctctgcttctctagcctgctgcggagactggggctggaggctcctctgtgaccagctatccttcgggcctttttcacaggctggtcctaaaagtgggagattgatggtggttatgtgactatgacacggcccatgaagattcaggcacagctgagtggcaccgtggtcatggctgtgggttttctctgggtctcagcttgccctctctctctgtttgcaccatctgcctctgtcacatcccgggcccttctgacttcaccgtgatagcgaaactcctctgagatgccgtggggctgagtccgctgtcagtttgactggatgaagcttcagtgagctcgagcctgtccctcttccgctgaaagggaaaccctggggtctggcctttggttagaatattgggatgccccagctgtgtctgtgagggcgtttccggggggagattgctgtgagggttgggagaccaaatggtgaagacccaccctccatgtgcgtgggcacacccagtggccggggtcccaaatggaacaagaaggcagagaaagaatgaattccggctctctcccgaagccagctcacttctgtcctggacgccaggactccaggctctctggcttttgaactccaggactcgcacgcatggcctcctgggttctcaggcctttggcctcaaactgagagtgatgccagcggcttccctggctctgaggcctttggaccaggagtgagtcacagcccgggctccctgggtctccagcttgcaggcggcctgtcatgggacttagcctccataattgagtgagccaattcccttccaaactcccttctcacccctctgtctccccgctgtgggttctgtcttcctggagaactctgactgaaacaactcctttgtgggagaagtcccggccgtttgggagcccctgcccctgctctagcctggaggtggcttggagctgctgctcagcgtgtgtccagggacaggttcctttcatgcccttcctgaggcagagccagattcccatgccccattgctgctactgctgctaccactgttcctacgagtgcgactgccgctgctaccaccagcatcaccgccagagctactgctaccactgttactatgggtactactgataccacagtgccaccaataccgcttctaccagcactgctattccttcttctaaattgaggtgaaattcacacaacgtaaagttcaccacctgaaagtgtacgacagtggcgtttagacattcacaatgttgtaaaacccctatctctatttttgttgttgtcattgttttgattttttgagatagagtctcactctgttgcccaggctcgagtgcagtggcgtcatctcagctcactgtaacctccgcctcccgagttcaagcgattctcctgcctcagcctcccgagtagctgggattacaggcatgcgccacatgcctggctaatgttttgtatttttagtagagacagggtttccccatgctgtccaggctggtctcgaactcctgacctcaggtgatccgcctgcctcagcctcccaagtgctgggattacaggcgtgagccaccgcgcccggccccctatctctatttagttccagaacaacccatggaaatggaaaccacgcaccctctaagcagtcactccccgtctccctgctcccccaagctcctggcagtggtgagcctgtttcctgtccctagggagtgcctgttccgggcgtttcatggaactggaatcacacaggcacgtgccttccgcgtctggcttctgtcagcacagcgtcttccgcgttcatccctgctgtgcacgcatcagcatcgtgctcctttttgtagctgaatgctgtcccctgcacggatagaccacattttgtctgttcatccatggatggacacgcgtggcttccaccctttccgatcgtggataatgctgctgtgaacacatgtgtacgtgtattcgtttgggtccccttagggtctatacccgcaaggggacttgatgggtctacggacgttctgtggtagctgttggaagaagccctgttgcttcttggtgctccctgctgagcatatcctaaggaactttccaggaaggatctgtgggggccagacttccttagacctggcctgtcccccactccatcacagctggcccagaagctgctcctctctctccctgccgaaacccagaggactgttctgtaagaaagtggacacccttgccagcggatgctgggatgcaaagcacagctctgcatcagcattcctgggtcccgtccctgtcaagattcccttgcccatagctaacaggaaagcaaactgcacagcgctgctcaagggagagtcatgtcctgacctcactttgtttgcgggactggccaagtgcaagtccccgtgggatggaagaggaaagggggctcagggaggcagagctcccgctccaggctcagagggagtcaagacagagcctggcgtcctcactctgtgaccccatgccagggctccctgcccaagggtaaagaaccttggatgaggtccaggttcattaatccctcgccagcacgactctgggcagggatcttagtcagggagattatgggggccaggttagaggaggtatggggacctgggccagcacaaggggaaaacctaactctggggcggggagggaggtcagggaaggctccctggaggaggaggttctgggggccaagtcttaagaatgcaaagcagatagtcaggaggaaaggggctgatggaaggagggtgattctggcagtcataaagcttgggtgaggtgggagagtaggggcagtgattagagggacaggaagggaccctcccaggaaggagcttgaccgccagtgcaaatgtttagattttatcatgaaggcctcgggaggccctggacagctctaagcaagaggagctatgggataggaggtcggatcccatctggaaatcttattctggatcagcaaggggtgagccgagggagggaccccagcacccagacctctgtcttgcagggctggagtgactgtcaacaagctaaccagtgagacaggcgcgagcccacactcagggacttgggcttccctggaagcctcatccactccccatctcacccaagctttcctgcaagcctggaacgcctcatttcaccagacctcttcctcctgaataccccacgcgtccttaagcgcatacaccaactttcacgcgaagcagaatcacgtggcattcggaacttcgtgtacgtgtgaaatgtaaaagtcctgaactgcaccaaatatcagctttcacacacgcagcaaccatttctctgcagcccatcacccaaggaccaaatctcacactcaacttgacaggtgtggaaacagctcatgactgggtcgtacctggctcccggggacaggacagcagtggctgccaggctgctggtgggcagttcagggccagcagatcccaccccacctcccctccaagcccccacggggatgtggccccctggcctttattccttcattgcttgaaagctggttggcagtttgttctcagcctggctttgagtctggggaccccaggacaggactggtccctgctttcctggagcaaatgtggctcggaaacagccgtaaagatgcccagcaccaggcagggacccgtggagggcccacaggggtgtgagggagccctgctctatcagccatgtcactggacaggttgcctcagctcttgagacctcaggatgaaacatggcatgttctagaagcatttgtgaccaggagagctagagactttcctaagggtctcaaccaagccctgtggggctccttggcgccccagccctcagagggtcccgctggtggacgaggggctaaggagaccttggccagactggcactgggagagcaaattctcccctttctcccaccccatgagcatgaccccgaatggttctctgtccattccggacctcatcctctccgtcgtaaatgaacagactggatcagaccacagaagtttcccgtagctctggcctgcgttctgtaactctagacaagctaggccatcatggctcctcccccaggacagatgatgagcagaaacagagggtgtctttctgtagatcacacaacagagggatacctgagtggaggacagacagaggtttctgagccaccgcctaaggctcctactggcagcaaaccaagaggtgtggcaagtgcagggcggtgcatgagtgtttgcaggtgcagggcggtgcatgagagagtgtttgcaggtgcagggcggtgcataagacagtgtgcgtaggtgcagggtggtgcatgtgtgcttgaacataggcatgagacagtgtgtgcatgtgtgtgagtgtgtgtttgggggagtgggctgagcccactcaaacctctccccaacccccagcactttgtccaaacagttccaggcagcctggataggctggggtatggatctctttttctggcctcttgacctcccctggaggctgggaggcctccccttctcctcaaccccatgtatttttaggccatctccctgcaggcaagatccccggagaccatggtgcaggcaagtgtctacagctgtcgcctggaagcctcctttcaggccagcagcagtgggggcagggtgtgcagaatgaagtggccagtggtgcctctagacttcagttctcttagtggaaaaatggggaggataaaatcagtttggtgggaggtgacgtgagctgatgcatggagggtgcttggcacggatcctggcattcagcagaagcttgacaaatgtcagcgtggccccacgtcccaggtacatgtgcccccatgtctgccataggtgctacagttcacaaagtgtgcttgcagacttccttctgtctcatcctcacaactgccccgggggcaaagacagcccttgttagcctccttcctccctgtgctccacagcctgcttggttccaggaatcaggagaggaatgtggctcctccagcccttagtttgtcaatcccggcagggaggtgactggagtgggagaggtctgggggaccctctgcaaggctggcctatcgatcttcctgggcacagtgatgcagagcccagggtggggttgggtagaaggggctggattaacgaagtgacagagagcttgaagagcatgaaacacccagctggcagcacagcacaggcactcagtaaatagtcgtcatcatcatcaccaccttcatcatcatcatcatcaccatcatcatcatcatcatcaccatcatcaccatcaccatcatcatcatcatcaccatcatcatcatcaccatcatcatcatcatcaccatcatgatcatcatcatcatcatcatcatcatcatcatcatcatcatcatcatcatcatcatcatcatcatcatcatcatcatcatcatcatcatcatcatcatcatcatcatcatcatcatcatcatcatcatcatcatcatcatcatcatcatcatcatcatcatcatcatcatcatcatcatcatcatcatcatcatcatcatcatcatcatcatcatcatcatcatcatcatcatcatcaccatcatcatcatcatcatcatcatcatcaccatcatcatcatcatcaccatcatcatcaccaccatcatcatcaccattatcatcatcaccatcatcatcatcatcaccatcatcatcatcatcatcaccatcatcatcatcatcaccatcatcatcaccatcattatcatcatcgtcgccatcatcatcatcatcaccatcattatcatcatcaccatcaccactaccaccttccttttcatcgctgttgttgtgggcatccccctcctcaccagcacctccatcatcatcattgttgttgtcatcatcatcaccaccatgagccttcctctcctcttcctcatcctcatcagcagcatcaccctcatcaaaatcatcatcatggccatcatcatcaccaccatcactctcattatcattctgggattgggaagagaggagggagtgggcagggtctcatcccattcctgacattttgcctgccagtgtcaacccagagttgcctgggagcctgcagcccccatctccatgttcattctagtctcaatactatagaccgccttcccacccttgaacccttgaatcctcttactcttccacccccaacacagatgatgggcttcccaaggaggaagagtcaaggatgtcagtctgaatgctccttggggaactctggtggggcttatttcagataccttgattcttcatggttcataggttcaatgttgagattgatctttgtgatggtcgatctttaatttatctgctgcttccacagatatcagtgaaagacacagtcctggccctgacccatgctggagggctctggagagacccacagggtagcagatggagtataggatgtgagtcttgaggtggggtgcacccttgtgaggggcacctaacctgggcctgactttgttgtcattgttttttagaagatattccctcccttcctccctctttcttccttccattcaaattgaaattgctttagaataggtcacacaatcacttgcttcaaaactgaaaatatgccaaaggtttgaagtcatctttccatccctgtgctggggctgccacggcccgtgcaaaatgaaaacatgggccctttgttaaaaagtcattaagagtcattaggaaaatgcaaatcaaaactacaatcagggccaagcatggtggctcacccctgtaatcccagcactttgggaggccgaggcaggaggatctcttgacttcaggagtttgagatcagcctgggcaacatggtgagactccatctctacaaaaagtttttaaaaattagccaggtatggtggcacatacttgcagtcccagctactcaaggttgcagtgagcagtgatcgtaccactgcacaccagcctgggtgacagaatgagagcctgtctcaaataaaaacaaaaacaaaaaactacaattagataccacctcaaacctgttaaaatgactactattaaaacaaaacgacaacagaaaatattacaagtgtcggatggtgaggacatggagaagatggaactctctcgcactgttggtgggaatagtaaaatggtgcagccactgtggaaaacacgatggtggttcctcaaaaaattaaagatagaattaccatatgatccagcagctccacttctgggaatacttgctatgacgtgaatgatggtgtccctcccaaaatttatgttgaaactcaaaccccaatgcaccaatattaagaagtgtggcttttgggaggtgattaagtcgtgagggaagatccttcgtgaatgggattagcatcattataaagggtctggaggttgaaggcagtgctgtcttgcccttccaccttccaccaagtgaggactcagcaacagacaccatcttaaaggcagatagcaacaggcagacagcagtcctcaccagacaccaatgccagggcttgatcttgtgcttctcagcctccaaaactacaggaaataaatgtatgttctttataaattacctactctaaggtattttgttatagcagcgcaaatggactaagacaatattcagaagaattaaaagcagagtcttttttttttttttttgagacaaggtctcactctgttgcccaggctggagtgcagtggggtaatgctcactacaacctctgcctcccacgttcaagcaattctcatgcctcagcctcccaagtagctgggactatcccaagtagctgggactataggcactaactaccatgcctggctaattttttgtattttaataaagacagggtttcaccatgatgcccaggctggtctcacactcctgacctcaagtgatcctcccaccttggcctcccaaagtactgggattacaggtgtgatccactttgctctgctttttttttttttttttttttttgagatagggtctcactctgtcacccaggctggagtgcagtggtgctatcatagctctttccagccttgacctcctgggctcaggtgatcctcccagctcagcctcccaagcagctgggaccacaggtgtgcgccaccatgcctggctaattttttttgtatattttgtagagatagggtttcaccatgttgcccaggctggtctcaaactcctggactcaagcaatctgtatgcctcagcttcccaaagtgctgggattagggccactctagccaaaagcagagtcttaaagagatgtttgtacacccacgtacatagcactattcgcagtagctaaaacatggaaacaaggcaagtgtccatggacagatggatggattaacaaatgctcttatccagacaatggaatatgattcggcctcaaagaggaaggaaaacctgacaaatgccacaacatggatgaacctcacggacattcacatgctaagtgaaataagccagacacaaaggaaatactgtacaatactttttagaagtacctagaataatcaagctcattgggacagaaagtagaagggagggtgccaggggctggggatagggagaatgagaagtcagtgtttcatggggacagattttcagttttggaaagattaaaagagttctgggccaggcacggtgactcacgcctgtaatcccagcactttaggaggccaggcaggtggaccacctgaggtcaggagttcaagacccgcctgggcaacatggtgaaaccccatctctgctaaaaatacaaaattagcagggcgtggtggcaggtgcctgtcatcccagttactcgggaggctgaggcaggagaatggcttgaacccgggaggtggaggttgcagtgagccaagattgtaccattgcactccagccttggtcataagagcaaaactctgtctcaaaaaaaaaaaaaaattctggagatgtatgggggtgaaggttgcacaaccatgtgaatgtacttaatgccactgaactgcacacttaaaaatggttaaaatagtacattttaagttatgcatattttaacacaataaaaaattagaaaaaaaatcaggaatttcaagacagtgacaggagagcattaaaccgtgtacggggccctttggagccaggctttgtggctttgcaggtgtcatgctcatgaagccaaacctgtctgtccctcaccaccttggggcttctccaggagcagccagtactctctcttctgtccctgttcacagatatcccatgaatgcgcaatgagtgtgtggatttgtttactttccccttgccctgcttacacaaaccagggcacgcaaacctctgtacctggctgcttcaccttgtgtccttaagcattgctccatctcagaatagaaagggcgtcctcatttctctgacagctcccaaatcgtccattgtagggagatgtcacaatttattaaactgtactaccactgatgagcctttaggtggtttcctacttttgataacacaaatgacgtggcagtgtctgtaagtgcacaccagctgcaggtacacaatttctcagtgtgccggcgcatctaggaaaaattcctagacctggaattgctgaatcaaagagacaatttaaagaagttaggctggatacggtggctcaagcctgtaatcccagcactttgggaggccaaggtgggcagatcacctgagctcaggagttccagagcagcctgggcaacatggtgaaaccccgtctctactaaaaatacaaaaattggctgggcgtggtggcaggtgcctgtagtcccagctacccgggaggctgaagcacgaaaattgcttgaacctaggaggcagaggtggcagtgagctgagatcacaccactgcactcctgcctgggcgacagagtgagacgcggtctcaaaacaaacaaacaacaacaacaaacacaaaacaaaaaaaacgaagttaggctgggtgtggtggctcacgcctataatcccagcactttgggaggccaaggtgggaggattgcttgagcccaggaattagagaccagcctgggcaacatggtgaaaccctgtctctacaaaaaaaaaaaattaaaattagccaggcatggtggcacatgcttatagtcccagctactctagaggctgaggtgggaggatcgcttgagcccaggaagtcgaggctgcagtgagttatggttatgccactacattgacagagaccctgtctctaaaaatattttaaaacagaagttgtactaatttacatgcatgagaaacgtgtttacccaccaatgaagtgtgtaatcaaagtttctgatccttaccaaataaataactgaaaatttgtatttcagaatagttttaatttttatttgccttattaagcagagttgatgacacaccaaaagtgtgaacggcaaaagaaagaaatggataacttggactttatcaaaatgaaaacttttgtgaatcaaagaacattatcaagaatgtgaaaagaccacccacaggacgggagaaaatatttgcaaatcatatgtattagtccattttcacactgttataaagaactacctaagactgggtaatttataaagacaagaagtttaattgactcacagttctgcttggctggggaggcctcaggaaacttacaatcatggtggaaggcaaaggggaagcgaggcttgtcttacatggtggcaggagagagagatccaaggggaagtgtcaaccacttttaaaccattagatcttgtgaaaactcactcactatcatgagaacagcatgagggaaaccactcttatgatccagtcacctcgcaccaggtccctccctcgacaggtggggattacaatttgagatgagatttgggtggggacacagagccaacccatatcatcatgtatctgataagtatctagtatccagaatttgtaaggaactattagatttgactacaaaaagacaactcaattaacaaacgggcaaacgacttgaatagatattctccacagaaggtacacaaagggccaagaaacatgaaaagatgtcccgcgtcacaatcattggtgaaatgcaaatcaaaacctctatgagacactacctcacgcccactaggatggctattattttttaaaaagagagaataacaagggttggcaagggatgtggagaaattggagcctgtatacattgctggtgggaatgtgaaatggtgcagctgctgtggaaactggtttggcatttcctcaaaaagttaaacatagaattaccagacggcccagcaattccgctcctaggtatattccctaaagcactgaaaacaggaactctgacagatacacacacattcatagcagcattattcacaatggctaaaaggtgaggacaacccaatgccatcaatggataaatgaataaactgtggtctgtccacacaatggaatattattcagctataaaaaggaatgaaattcggatacatgccacagcatggctgaaacgcagaaaacataactgtgtgaaagaaaccagacacaaaagcctacattttgtatgattctatttatacaaaatttccttttggggtgatgaaaatattttggaacaagatagaggtgatggtttcacaacaacttgaaggtacttaacttaacgtcactgaattgttcactgtaaaatgatcgattttgttaagtccatttcacttcgattttaaaaagtgaagttgagctattttaatgtgttcaagaaccatatgtacttccttgtctttgacctggtgatatcatttgaccatttttctattgagttattgatttttagaactgatttgtaattccactttttaaagaaaatgatcctgtgtgatagattgcaaatctttttctcagtttttaatttttttttttctgaattgggttatggtgaattttgctctgaatattaaaaaaataatacagtaattacaatcaaatgtattattctttcttttacagcacctggttttggagtaagatttggaaagatcgtttaaaaattcctccatgctttcttggagctctctgtaggttcttagatttttgagccatctggagtttatttggtgtcaggtgcaaggtttggattcagctttttttttttttttgatgatgtctgggccgttccatcaccatttattacatcatcatcttttcctctctgggttgagatccctcatgggtcagttcctgggcatcagactctgagactctaaggcctgtgcaccatgggtttagtggggtgctcttgggaatgacacctgtggaggccgaggtaggcaagattggacagaggaaggtcgggtacagtgccttacacctgtaatcccagcactttgggaagctgaggtgggtggatcgctagagttcagaagttcgagaccagcctgggcaacatagtgaaaccccatctttaaaaaaatacaaaaattagctacgagtggtggtgcgtgcctgtggtcccagctactcaggaggctgaggtgggaggaatgcttgaacccaggagccagaggttgcagtgagccgagatcgcgccactgcactccagcatgggtggcagagcaagacccttcctaagagaagaaaaagaaaaaaagattgggcagagggcaaagttgggccacagtgcagtgggaagagcagcctctgctcccaacagggagctctggagctggggcggccccacagagaggcctgattgaggccagaggccctggcctttgccccatcacatcagccagccctggaggagtgcagccttaagggaggcagtgcctggggagggactcagccaggggcaaccctcctgcagctgaggataagcacccaggtcctgaggagggacagtgggcagcacagcacagcgtccacacccctgcccctcgccccagcagcatgcacttccgtgtggcaagctcactccatcccatccgaagcaacacctccaggactctggttggtccctgtattcgcttcccagagctgctgcaacaaattaccacaaacttggcataaaaggaaagagatgtattcttcacagttctggaggcctgacggctgaaatcaaggtgtcagcagggcagcgtccctccagaggctctaggggaggatccttccccaccttttccagcttctggggctccgggtctgggacttcgtccctctaatctctgcctctgccgtcacagggtcttcgcctctgtgtctgtgccatctcttctttgtgttacagagatacttgtcattgcatttaggacccacttcgtcatgtaggacaatctcatctcgaaatccttaatttaattacacctgcaaagacccttttcctaaataaagtcacagtcacaggttcctggggctaggccttcggcttatctttttagggggtcaccattcagcccactctcgtctctattcctggggaaactcacagaggggagtgcatggttcagattcaagctcccgccactgcaggtggcacccagaggtgatgtcatcttcccctccactctccacccaagagcccctttaccttcagtgagtacctgtgctggctaggtggtttacctggtggggggacccagactcgaatgccaaggctatgagccccaggtcaccacgtcctctcaagctatggctgctgtcttcatgcatttgctgtaaaaactgggcatgggagtgagaagagatgctttgctggattcacccctcccattctccccttccctgctagggaacagcagccctttctccccacggaccacggtcagctgcccctgccaagatggtgactccttttcttgcttgctggctccttggcacagaagcccgaagtgctcagccagcagccgtagtgccaagtgtaatgggacccatgatgcaaatcctgctggaagggtaccgctctgggaatcgggtcttgcagactcaccaaacctagagttgtgaggttggaaggcagaaattcccccagggagaccactggagtgacagtaaatggagacattcctccttccaccccctgcttcctggatcaatgcattctgcctactggggacacgcccctagaatggttgttgatttcaggtgtattctgcatctaggaggctgaggtcacatccttgcatcatcttagccatgccttcaaaacgctgttgcatcacactatgagactagtggcttctgggtggtgcagcgtgtgacagagtcaggggacccctggtctactccaacagccctttggccatcaataggtcccttggtccaatgtggggattttcactttccacctcccagactcttgagggtagcaagggtagcttgcttctgcctctagtcatgctcattctcgatcttgatggacaattttctttctttctttcttttctttctttctttctttctttctttctttctttctttctttctttctttcctttctctttctctctttctctttctttctttccttactccctccctctttccctccctccctctctttctttccctccctccctccctctctctttcctttctttctttctctttctctctctttctttctttctttcctccctccctctctctttcttccctccctccctctctttcctttctttctttcttccttccttccttccttccttccttcctttctttctttcctccctccctctctctctttctttccctccctccctccctctctctttcctttttctttctttctttcttttctttctttcttttcttttgagttttgctcttgtcacctaggatgtagtgcaatggcatgatctctgctcactgtaacctctgcctcccgggttcaagtgattctcctgtctcagcctcctgagtagctgggattacaggcacccgccacaccagccagctaatttttgtatttttttttactagagacagggtttcatcatgttggccaggctggtctcaaactcctgacctcgggtgatccacccgcctcggcctcccaaagtgctgggattacaggcgtgagccaccgcgcccggccttgatggacaatttctatctcacagtggatcctgctgggtctacctgaccttctggcttggcaggtctgaaaagacccagctcatgacaggcaattctagttgcgtgcctgttgatggttgatagccaaacattccatctccagcagggccccggagctgtttttcaaactatgtataattctctgctgcaaatggcatggcctttctccagttggggcttgtcatcagcaatgcatggcatcttttttcctgcacaagctctagaaccatcgggtctgcagagccatgtggcctgggtggcacagctgtccccactgcagagccccttccacctgtgggttctctcaaagctggctgcctttcatggattcccaagtacagaacatgctgcctccagagtccaagtaatctccaagcagccctccacggtgggagcgggtatttgtctacttttaatgtctcagcatgccttagacatccggacccatacaaaccttgtaggcctttttttttgagatgaagtcacactctgtcacccaggctggagtgcagtggcgcaatctcggctcactgcaacctctgcctcccgggttcaagcgattctcctgcctcagcctcccgagtagctggaattacaggcccatgccaccacacccagctaaattttgtatatttagtagagacagggttttgccatgttggctaggctgacctcgaactcctgacctcaggtgatccgcccaccttggcctcccaatgtgttacaggcatgagccaccgcacccggtccctgataggctttatctcctgtccctagagtgcaggtgtcttacaaggtttccaaagtactagccgcttcttgcccatcttatctcattaatgtgatagcatcggtatagtggacttccatggtattctcctggaagtccaggtcccttaggtctgtattatgacagatggaaggagagttaacagagccctggggcaacacagtaaacatttactgttgtccattccatgtgaatgcagcctgcttctggcctcctttgtgatcagggtggaaaagaacgcacttgccgggtcaatggctgccaatcatggacctgtggccatgtcattctgcgttagccgagatgtcacatctggaagaacagctgccattggggctaccacttagttgggtttgcagtctactgttagcctccaggatttatctgtgcttttgagagagtctagtcagttatcaatgtcatggtcctctgcccagttttcagacctatgacaattctcagatccaaaactcattggctagggagaggctaggttccatatgcaaccccatgaacagtgtgtacggttatgactcccccagttcttccccagggacctgtggccacttaggtcaccatccatggagaaaggggaccattcacacaatgtctgggtgtgcaggaggactgcacgtcctgcaaccttgaggtctctgagagtggcgcaatctccgcggctcccccaaggatgcaacactttgtgtatgcacagtcttagctagggggtggtggtgtattagacgtctattgctgctgtaacatggcaccatacacttgaaacaacattggcttcaaacaacatagatttattatcttacagttctgaagctcggaagcccaaaacgagtttcacggagataaaatcaaggtatcagcagggctatgttctttcccggaggctgtagggaagactctgttttcttgccttttctcccttctcgaagcctcctgcatggctcatgaccccttcctccatcctccgagccagcaacactaggctgagtcctcctcgcacgacatcgctccgacttcttccatggtcacacttccctcttactcttctgcttccttttttcaagtctaaagaccctgtgattacattaggcccacccaagtaatccaaaacaatgtctccatctcaaactcagctggttagcaaccttaattccaacggcaaccttcattcccctttgccatgtaaggtgacatagccacaggttctggggattcaagtggggacttctttggagggccaatattctgctgctatgctccgaatatttttgtcccccccctccccaattcatgtgttgaaatcctaactcccaaggtgatggtgttaagaggtggggcctttggaagggatgagtgccctcataaaacagactgaagggttctcattcatcctccgcctccatgcagacagtgagaatctgtcatctatcaagcaggtactgagccctcagcagaccttgaatctgctggagccttgatattggatttccagccaccagaagtgtgagtcatagacttctgttgtttctacaccacccagtttatggtattttgctccagcgccctgcacggactaacgctgcccaccaggggtgcagtgacaaaggcttccacctgccttcctcgttttgacagctcttactgggatgaacggacgagggcagaggttatgtccacaccaactttacattcagggaccaggaaatgaccactggatgggtccctggtgccagtgaacctgctgcgagccactggggcagggtgatatttatcacttggccctcacactctaacagaaagaccacgcttacactttgagtccccaagtatcaactcagacattgtgtgaatggtcccctttctctatgtgtggtaacctaagtcagcggcccaggtccctgcagaaggatgggggagtcatgaccatacacactgttcatggggttacacatggaacctagcctctccttagccgatgcgttttggatctgagaattgccataggtctgaaaactgggctggggaccatgactttgataagcatctgccctccatctcctttgtccacgcttggctccttgaagctgtataagtgaagcagcccccttcctggctgcctatcacaccccttgggacactgtgttcttttttgtttgtttattttgttttgtttgaaactccatctcaaaaacaacaacaacaacaaaaactcccagactctagccattctcccattgctctgtcacccagctcagctcactgcaacccccgcctcccaggttcaagcaattccctgcctcagcctcctgggtagctgggattacaggcacctgccaccatgcccagctaatttttgtatttttagtagagacggggtttcatcatcttgaccaggctggtcttgaactcctgacctcgtgacgtacccaccttggcccctcaaaatgctgggattacaggcatgagccaccgcgcctggccagacactgtgttctctttccttttttaatttctttctttctctttttttttttttttttttttttgagacagagtctcgttctgtcactcaggctggagtgcagtggtgagttctcggttcactgcaacctctgcctcccaggttcaagcgattctcctgcttcagcctcctgagtaactgggattagaggcgtgcaccaccacacctggctaattttgtatttttagtaaagatagggcttcaccttgttggccaggctggtctcgaactcctgacatcagatgatccgcccacctcggcctcccaaagtgctgggatgacaggcgtgagccaccgcacccggctgggacattgcgttctattaaccaccctcagagctctctctgggtcagcaccctcactgcactgccaatctgcccttgttgcttttttatgggaatttgtaaggttgtcctgggggtctaccatccccactggtgtctgggagcctgtgctgtaccagcacctcctacaggcagtcctgcccacagacgggctttccagtgtgtctcccctccccatgtccctcgttgcttgagtctcccatggaacacaggtgctgagtgcagtgtccagccttcacgtggaacgccactccagccccgccacgtctctcagcctttggtctcttcctctgccatctgccacggttggtctgggatttttgctttgctcaatgtagataacccttttctccaaacaggaaaaagagccattaaaggcactgaaataggaggccttcccttttcttccctctgcagagtctctctctatttacagtgcttttatttgctaatttaggccactctaagtaaagaaaaattaaaactttaaattattacatgcatatttcactactggcctttataaggtgcaatgacagttttaatggcaaatacaaaagcatttaactcatgtggaatcgctgaaacctcacaacccccgttgcgtagcttgttcatggacacgtacttcgtgtttagcagcggagtggagacgccccacaaaccagactcagctgcgtgtatttcacttcttgagatgcacattctcccaacactccccgcctccagcctcctgctgagtaaggaagggctgagaggaaaagagccggagtgggccccgcctttccctgtccttctatgccatcacgtcagcgtgagtgcttggctgatacagggaaatgacacaagtcaggaaggacttcatgggctgccttggccgttcatgtttcttagaattccattgcgttattatttctgtgattgaagcaagttctggttggaacagaaagcgtgggcatttggaaccacctgggtcccctcgtcctcagctgcagacatgatatgttcaccttgctcactgagtctcactgaacacccacgggcgtgggtctgctgggacactgtgctcatggggctttgccaatgtgatatggcagtagggcacgtcctgtgagtctctgcccacacgtgcgctccaccaccccagagacctcagttgcaaaacacaagctcaaagataaaataatcatcatcattattattattatgttattatgtcgagacagggtcttgctctgtcgcccaggctggagtgcagcctcaaattcccaggcttggctgggcgcagtgactcatgcctgtgatcccagcactttgggaggtcaaggtggatggatcacctgaggtcaggagtttgagatcagcctggcctacatggcgaaaccccgtctccactaaaaatacaaaaaaaaaaaaattagccgggcatggtggcaggcatctataattccagctactcgggaggctgaggcaggagaattgcttgaacccgaaaggcagagattgcagtaagccgagattgcaccactgcactccagcctggatgacagagtgaaactcttgtctcaaaaaaaaccaacaacaacaacaacaaaaactcccaggctctcccagcactttgggaggccaaggcgggcggatcacgagatcaggagatcgagaccatcctggctaacacggtgaaaccccgtctctactaaaaaaaaatacaaaaaaattagccaagcttggtggtgggcgcctatcgtcccagccactcgggaggctgaggcagaagaatggcgtgaaccagggaggcggagcttgccgtgagcggagatcgcaccactgcacttcagcctgggcgacagatcaagactctgtctcaaaacaaaacaaaacaaacaaacaaacaaaaatccaggctcaagccattctcccttctcagtcttctgaatagccggaactacaggcacatgccattgtgcctggctaatattttttattttttgtaaagatgggggtctcactgtgttgcccaggctggtcttgaactcctgggcttaagtgacccccccccatctcagcctcccaaagtgctgggattacaggcatgagccattgcacccaacaaagataaaattattaagaattttgagctggcagtggcagggcattaagccaagcacaggtccttctgggctcggggccctgtgtgaccacagccgttgtgttcctgcaacatcagccctgtttatacacacgtacacctatgtgtatacacactattgaaatgttttacaacttcctttttttaacttaataacatagctcaaaaatcatactatgcaagaatatgccttacatattccttaaaaatatacttagtgcttttaagagaatgtataacatttcattcaatgtatcaaaatttatttagccaattttcttttcatagactcccttttcctcaatttttcccccttacaaaacaatactgcttcaaatatcttcgtgcacttgagtaaatgtttctgtcccaatatttctatgggtgaagtttctggaagtggagttgctggctcacagtgtatgaagattgtatattataagagataacaacaccttaccaatttatttcttcacctgccacagtgcacacctgtttccgcatgcctcctccgacatgtgatattatcagagttttagatctttgcatcttggcaaaaatgcctcattgctgtttttatttgtattaaatcatcactaagattgaggattttatcacgtttgttgattcatttgtatttcttctcttgtaaactatctgtattctttgaatgatgttccgttgctttaaaaaagaaacagtaaacttttcatgttagaatggttttcgacctgcagacaagtgttgcagactgtacagagttctcattacctgacaccatttcccctcccattaatacctttcattcatgtgggaaatttgtcacaattaaagaaccagcattgatgttaaagtccacactttctccacattgccctggtttttacctattatcctttttcttttccaggatctcacatgacatgcagtgttcgggtctccaggctcctcttggctgtgacagtactcggactttccttgtgttttttgtttgtttgtttttgagacggagttttgctctgtcacccaggctggagtacaatggtgcaatctcagctcacagcaactttcacctcctaagttcaagcgattctccttacctcagcctcccgagtagctgggactacaggtgtgcatcaccatgcccaacattttttttttttttttgtattttagtagggacacggtttcaccatattggccaggctggtctcgaacttctgacttcaagtgatccgcccgccttggcctcccaaagtgctgggattacaggcgtgagccactgcgcccagcctggtcaggggttttacagaccgtccctctattgggatgtgtctcggtttttctccggggccagaagcacggaggtgaagtgcgcttctcaccccaccacgtgaagggtccgagctctcacccaccatgcggctgtgatgtgggcccggatcacctggctgagcgggaggtgtcaggtttttccacggacaggttattctttcccccttttcatactgccctgccacattttcgtttcactctcatttgattcatgtatcagaaaataagctcttgaaaccccaaggcagagcggctctccctggtctgcccgtggtgctgggcaatggctgagttctcatcacctctccctgcattgcccactacccaaggctcggggcgtttgcccgcgtgggtgagggccctcagtgccccggccctgcggcccctggtttcaactccagtcttggtagcagcctttggcaggggctggctatgagtaaggaagggctgagaggaaaagagccggagcgggtcccgcctttccctgtccttctatgccatcacgtcagcgtgagtgcttgcctgatacagggaagtgacacaagtcaggaaggacttcatgggctgccttggccgttcatgtttcttagaattccattgcgttattatttctgtgatggcagttcccaggcctgtcctgaaatccaggtgtcccgctggaacttcagtctctacgtggccaaaatgaatgttttcctcctgcagtcttgactcctccaagatctgttgattgtccccaaacattcccagagtctgctccgtcctttgccagcctctgtctctctacctgatgtaccgtaaaggcctccagaccagccaggctgacccaccgagctggcttggctgggactgagggtccttcggggagtggctgtccagtgctaacacagacggttagacaccctccaacgtgtggccctcatcctcccagctttcctcccacaaacactcggccacggttgcaagagaattctttctataactcaaattccttctcttttctctcctgcctgagactccaaagcactttcaggataaaatccaccccagagggtttaggggactgtaaaaacaaaaacacatgaattaatgaaaaaacccagccatgtcatggcacagaggcctttcaccctccgcctcgggcctccgccctgccccgccccatcctggtgcttcagagacagttccgcaccaaatgctatgtcttggggaaaaggtggcaaacaggcttgtgcaggacagactacatctttatgtctttagatgattttgcctctgaaattgcattagtttcctgcggttgccctaacaaactaccacaaatgaggcagcctcagcaatggaaatctactgtctcgcagctctgggggcaggagccccaggtccagggcccagcagggcaggctcctgcggctcggagggagagtctgttctgggcctctctcctgtcttctccgggctgcaggcaacccttggtatgcctcgacttgtaggtgcatgactccagtctctgcctctctcctctccctgtgtgtggcagtctctgtgtcctcccctcctcttacaaggtcaccactgatgaggtttagggtccacctgaaatccaggatggccatgtctcaagatccttaactaattacctctgcaaagaccttattaactcctttcctgaggttctgggtggacaggaatttgtcgggaccaccaggcaacccagtacagacatcctggaggctgaatatgctgttggggaaactgaggcaggtgtctggatctgttctcaggattgagggtgagtggggtggacctttgtgaagtcctgtcgtttgcttgcagggttgggggtgccctgggcagcagactcacagggagactcctggttgggggggtaatcagttctggattcctgtgcggagaacagcatcaggaggcaggacccagcagagggcagaggcagcggccacgcagtcagtcctgaggaactgcatccatcttgcaggagctctgtagacaggaggcccccagcactaccccgagttggggaaagagggctgggccttcatattagcctcaatggtccttggaagcccctgccctcagaggggtgtgcccttagctgggcccatggccgagggccacttgatttctgataatcagccctttattctggaagcgggatctggtgtccaccaccacgggcccttaggtggatctttctgtttctgaaactccctggttcttgcaggccttggtttgtccaagcaagtcagtgtgctgaccccctgaccagacaggacacccatccttgacctgtggccacgcccaccctgccccttggccatgctcatgccaccccataaccacgcccaccctggctcacagcctcactcaccctaaccccggccaggcctcctgtgtggaacctgactggggacccaacgaggaggccagtgttcatggagaggctgcagattcttcatcagatttgccaaaggatgtgtggcaggagggacgggagccacatccatgtttgagtttttgccacgtatctctcagggtgcaagaggaggtcaggacagacctcctggctcctgactccctgtggggccagggctcagggtggccacccttatgctgggtggccccttcgccttgtgttggaaaaagccctgaaggtgggggagtttgtggagaaccagcccctacggggcttccctgtgccccccaggacccagcaggggccgcaggtgttgtcagtgtgccccccaagatcagagtgcaggctgctgggcaggctctgccggtggccctgggacacactccctcatcgctctcactaggccagcgttgtcatcccattttgcaggaggggaagccgaggtctggggaaactggagtaccagcctgttccttggctcggaggctgctcggctcaggctggcctatctgatgctggagactggggatctttctgcagggaccaagggcctgagggagctgactgggaagcccaccctggggactgagagcatcctccatcctccgggggctgtccaagcagggggagggggcagttgtggctgcagagcaagtggatacgtttgggaaggaggcagggagggggctgggagcttttgcaaagtggacaaaggtttgggggcaaaatccttcagctccatgagaaggagcttaacatatcctgggtcatcagggatgcgtgtatagactcggcgaggaggctcagcaaccgaggggtgggccctggggaccgatcccgtgttgcggttggagatactacaatgggtggtaagaatgatgatggttttgacaagagtaaggagcagaagcacagccgcagcggtcacatattcagcacagactctgcccctgctatcccctgccaccccctgccaatgcctgccacccctgccaccctctgccatcccctgccaccccctgccatcccctgccaccccctgcattttgcatctgttctttgtttggctgtgccttgccctgaccctgagagatcagtatttttcaccctctctggcagtggaggtgaccaaggcccagagaggtgtggcaacttgcctgaggtcacacagctggaaaggggcagagctgggatttagaccctggtctctggtgtctgtcactacctccagtgacttctctatgttgaggtgagcccatagccggtccatactgtgagcctaccatcgacctggccctccccggccagtgcccgctgctggctgcacctgtgatccccagggctcccctgggttctggaggcagcaggggccgccaggctgcccttcctcccttccaccagcctgcagcagggtaacggaaggggagggataattgtggctatttattcatggtcacatacctgtcgcctgcgcagttggggcctgaggaagggctccccggccagctgcacgggggctgagcagacagagacatccgcctttgcatccccatcagcaggactcagctcccaatttagagactgactcccttgattgagggccagggagctcccagagcagccaggctgacctcggcctcctgtccccaagcgctgtgtccaggaggcctgaccccagacccctggcccaccccacctgccttctgaaaacctgccacctggggcctggacaccccttctttgctcccaccagggctgaactcacccacgatggcctccccaagcccccccaacccgctgtgtggtcaggtggccgccccagtctcaggcccccctagctcagccccactccagcctcggatgtcctctgtggccaggaataaccaagtgactcaggcagtgcctgcagcaatgaccccactccccaggaactttcccttacaaggctgtgtgcagtccggagtactaggcaggaccactgccccacttcattcattcattcactcattcattcatccattcactaattcattcattcattcactcattcattcatccaccatacgtttattgagccagctcctttgcaaagctccgggtcacaactgggaacaggtaggtaggactccctgtctcgtgcgcttctgtcctaacagcagagctgggcagccagcaaaacgaccaggtggcaaaacacagtggacagagcagagctggggagaggcagcacaaggaggggctgggagagcaggactgcaggtgcgtgtccatgtgtgtgagcacatgtgtgtgcacctgcttgggtgggtggtcagaggaggctgccgtgcaaatgaccttggggaaaagctgggtggggcggcagggccaggcatgagcatgtctggaggaaccgagtgtcagggagagggtggcagcatgaagccacaggtggaaggtgggtccgggggcttgcaaagcagcaggaagctagtgagggagcagagggacgcaggaggaggaggtggggccaggggctggagggtcgaggggcaggtggaggagggcctcaaagccatttggaaggctctgggtatagctgggggtggaggtggaaagccaggtgaggacagatgagaaggcgcaagacgggcaacatcatggctcaggggctgtggttttgtagggggctcagagcgagggtcaggccaggccccagcctcagtcccctgaccgcctccctcttgggccagctccacttcctggcccctcctggagggtcaagcgcagcctggcgactgtgctgctggacgatgccactgggacaggccagggcactggggtgacctctcctcgggaatgagggaggggtgctgcccgcccgcccgcctgcctgtgcggtaattacagcggttcctgcctgcttgctttgaggggagccggctggagctcacagccagaggggcccgcaggtctcacctgccagccacgcccgctgtggcctcacctgcccgccctgcaggcccacagcattcccttcccagggaggggctgacccctggccgctggatgccgctgcagctgagtcacaggtcaccttgggcagggaggggctggtccagaggctgggctgtaggatggcagcatcaccccaactttagacggatcctgccccctggctgtttgcacgtgcagaataaaacattctcttgttcctttactcagacaaagccaccgttaacgttcgatgtgtttccttctagtctttctactatatatgagcacatatttttttaaacaatgaaatcagaaagtacataccgatgaataccttcagcgccatttccccatgatacttcaaatatttaacagctctattgacatataattaacataccataaattctcccattgaaagtatacagttaaatagtttttagtaaatttctagttgtgcaagcatcactataatctaattctggagcactttcatctaccctcaaagaaagcctgcacccatgagacattgcctcccattcccctcctgccgccgcccctgggcaaaccacaaatcggcttcctatctctatggattggcccattctggacacctcaagtcaatggagtcacacaaagctctcttgggtgttctgaagccccatatgaaacggctgtcggtgagctgtgcttacaccatgcttccttgttggtatcttgttttgggcatggttctgctttggatgggtcctcaccgtaaggcctgaaggaggggttataaaaggtgagagagaatttgtattcctctccccggccacggtgctccccaagaagaacacagccatgagctcttccccaaggacaggaactcatctcctttttccacatgggcgttcccagcactgccagcattggctgtaaggggctccacaaacatcggggtgacacacacctcaggactgtggcctctccagctggcttggccttcctgtgtggtgccgtggccccgccgacaccagggttgcatcaggaactcctctcccagatcccagcacatgtgaccagggtggcctttctggtgggaaaccatgattctcccatgatggagaggatggtcggaaagagccacccgggtggggtcacaaagatgaccatcccctgggaaggaggagttactgcccaatccagagaaaaccaacgtgaacctggataaggctgcaaagtaccgggacagcagcgtctgtgtgtcttgtcaacggattctaaaaggcagttcccaaaatattctcagccatggtcaaccactaaagccactgtggattggcccaaaatgccagctacccaggactgtgagggaaggggggtgtctgtgggaagtgtggggcctcagggagcctgtgtccatttgcctcttgtgcacaagggtggggaggtgccacttccggctgtggggcagagatgacagcctctccactggacactgctcagggtccctggaaagttccttcccttgcaaagtgcttagtgtgttaccaatagaccccagcaagacattgacccaaatgttgtcctctgtgtgtgtacgtgtgtgtgtgcgcatatgtgtgtgcatgtgtgtgtacatgtctgtgtgtgcgtgtgtgtgcatgtgtgtgcgtgtgtgcatgtgtgtgtgtgtgcatgtactgcacaccgagcacctgcctgtggatggtgtacacacaaacacacccaccctgcacagacacagaggcaagccgccatccacacatcgcgtcacctcctcggtggaaggcacagtagtgaccctggcatttcgtttttctagtttggttttgtccaagctggcttgtgaggtgcaggtgtcctcctgcatccagggcagggcaatgtggtctgtggctgtggtggtgtgtgggggacagatgaaggtggaagctcgcactgcaccccaccactgagcaccggatgagggcgaagggctgtccgcctcactggactccccgtgactgcatctacctgcttgctctggccagacctccccactagagcatggtccaccccaatgcccgcctccacccctctccttcagcacaggccaagcctccattccccctcccaacgtccaccctccctggcctgtgccactgcatggactcctgacttccttcccatccttacggggtggtcggcctgtgctgtctcaggtcctgagctgcccctcccttcccaagccatgcaccagggtccagcccagtgaggccatgtggtgaggggatgagccatggcctccatcaggacaagtggggctgtctctacaagagggctttcctcttccaccagtcttgggtgccagggagagaggcaaatatgggtagtggtgggtacattggctagatcagagggggctggcttcccagaagttgggagggtcccttttaaagtcatagaaagtcacacacctgcttgagataacagtagcacttttggtacctgctaaaggcaacacttactcccaatcccacaacgctgtcagaggactttgcatttcatcgcaacaggattgagatgactgaaagttgctgagcaaacctcagatgaatgaataatcacagaagggttacttggtgactttcacgcagtgtttgtgggcacagggttcctgaggttttgcagaacaccccagcaaggatcttgttgtggtgtcgatggctgcaggccacaggctgggaccccctgtcacacagggcaagagacctcccctggcagcctgtgctagccccccaggccaggcctgcagggaaagggggctaggggctggaactgatctcacgacagcctgtcctcggctccagcatgtggctccctggcttctggccacggctggctgggtcccctgtggcaggagctggccatcctggagttcaagggcccctgaagcactgcccacgcctgatcttcctccccagtgttctctccgctccaggggaagtgagacagcccagcccaggcaaacaggtccagctgcagctggcagccagtcccaagaacgctgccactcggccctccccgctgacctctgcacaccctcgcccggcgccctgccaggccttattcatgggctggcagtgccaggacctctcccggaggcggggcagagcagcagcttctcggccctgtgccgagcccaggcctgcaccctaggcaggcactgctccgtgatccaggaaccacctctctctacagctgggagtgagcagtcagagagggagacagccttgcccggtgctacccagcaagctagtcaccgagtgggcagagggaggagcggccctcaccggatgtcaagcagcctgggtccccagtccagctctgcctgtccctcgcaataacgcctcaggtatgttacggaccactcagcttgtttccctgtaaggaaacgtcccttctcccttgaaatatgtccctttctatcctcccggggccctcgcaggccaacagccaggaaggttggagctgagctgggctggcggtagcaacagcagctttctctcctgcattggctccagcaagtcttgctcagacgttggtggggtggggtggggagggtcaccgaggcagggaggagcctgggggttgtcctgtcgtcctcctgggcccctagagtagaaagggcacgtgaggaccatcgagggtccgaggggcatggacaggtgtgaggggactcacgggggtgggtgaggtgggggaaggagcttcccagagcagcacgggggcccaagcccaccctcctcgccacccctgccccacgaggccgtctgggttggggatgccccaggggggcctttgcgcaaacgtctccactggcaacagccggtcgcttggcaacccgcacgccccaggcccctgcgccccggggagccccgagtggggcgggggtgccccgcggctcagcgaagcccctcctgcagcgggcaggggaggggtgcaggcagcaaatggaaagcgctcacccaccccagagccagccgggaagtccttgctggagctgctctccggcactggggcacctgggcagccatgtgctgccacccaggaaggcaggagacccaggctgctccccaggatcctggcaagccccttcccttctgggacaatagaggcagcaaggccttctccgggggctgggtgaggagagagggcctgcaggtgtgaggcatctgttgaggcacaaaccagaggctgtgctcagctcagcaaaacacagtgcctgtgggtggtgggtggcagggtcatttcaggtgggatccaggatgttcaaagtgacatccaactctgggctggtccctctggggtcggctgggggctaagggcagcagctggacatgcctcttcctggaccctgggagctggtcgcctacagagcccaagctaggagctgctggcagtcattgtgactaggggtccccccatgcagtgcctgcattttagggagacattagccacccttgacgccagcctgatttggggtttagtcaccactcagggccatgcattccaaccaaaaagttacaggcgtccccatcttaactagcaccaaacccagcagtggggccgatgaacttggccaagcagcctgtgccaggatcctggtagaaagtgggtttgggcagctgcaggtgtgaaacatggcttagcttctctcctgggactggggcaggctccagttcagcagcccacctgaggcacctgcaaacacaggtgagcttttacacacgcccagcccccagagaaggccggggaggccttgccacctctgttttctcagaagggaaggggcttgccagcatcctggggaggcgtctgggtctcctgccttcctgggtggcagcatgtggccgcccaggtaccccagcgccggagagcagctccagcaaggacttcccggctggctctggggcaggcgagcatttcccctttgcctttacacacctgggcttctgcggtttcccaagggctctggtgaggaaacgggcttaggtgctgagaggggggcgcataggagtgggggcatttggccagggtggctgagtcccagcgccaccgttccgcacccggaaaccttggctgtgatgcttctctgtggcttctaacctggaacccgggggacatccccttgccccagtgccttctcaatgccaacggtgacccagcctgagctccccacctgccaaggtccgagttgagctctcagaacccttggcctttccgcagggcctccgagggcgtctggtggatcctgtgcgtgctctgcggcaccccctctaggctttccccactcactggaggccccagcctggcttcagagggactcagtggggcttgaccacgtcccagctgcgtgaccttgagcaggttccttgacctctctgggcctcggctttctcactctgtaaaatgggcacaaacaaggctttgtgaggatgagtgtggctgtcgtgcctgtgagtgcttatgtgattctcactcctgccccaggtcccctccagctcctcccttttgcggtcccgaggtctagcctaagtcccccttgcttctcttgcagggtgtttatttctctcggcttcttcctctccctacgctctcactttgttttatttcatctccgtccctctgccctccccttttcgctatcggtttcaattctccgctgaaacctctgaggaggccctgcccgccccactgtcccgccggccctccccgcagcacccaccctgcccggcttctccggggcttgccctcctgtagcccaggagttggggctgggggcggctgtgctgacatcactggcgtttatgcactgctccttgcccaacgcaaatctcatcctcgttctctctgaatcaattcacttttattgcctcagctgctcaaaagcaatttttcaagaacaaaaaggtcagcacgtccaagactaatcaattctcggagagctcctgccgctgccaggggagccgggctccagcagccccccgcccttcccgccagcccctcccaccagccccatcacttttattgcttcatgatgcctgtcattagtggtgtgtttgagacgccccacggtgttcttacaacataaaacctgggtgacttgcagcgggggtggggtcgggcgcatttatgggccctcgccggctccggacagtaagagctgagctgatggatcgcctgccaggggagccagcacaggaggccttcagccacttgcttacaagcagagccggggctgcctgcctgctcccaggcccacccctctcttcccctcaactccccatcactgtggccttggcatcggccagccgttatgccttccaggaatttgccctcaaggcctcactggtccccaccacagccctacccctccctgggcgtcgcccgcccccccccactctgcccgccacgatgccaggctcagtccctccagcactgtgaggtctacattgccattccacagatggggaaactgaagcccaatgtcacggaggtaggaaggggcagacgtagacttggaaggattctgtggcctgttcgaggttccgtgcatgagccgtgctccgtggagagccaggtctaccgttccagcctttgctctcccaggcccctggctgtccatgtcccacaccaccctgacacctgatacttgacacccgtgtcaccaacagctacagtgcaccacggccttggaacaccgcactcagtgctctgcctggatgagccctgtacccccatgacgaccccactgtggacattcttatgtccattttacagatgacgaaactgagacgggcggatgcagtgttgtgcacaagccacacagctggaaacgtgggctggggactggaacccaattacccgctttggctctataatcctctttttatttttatttaatttttttatgagatggagtgtagctctgtcgcacaggctggagtgcagtgacacgatctcagctcactgtaacctctgcctctcgggttcaacccattcttgtgtctcagcctcccaagaagctgggattacagttgtgtgtcaccacgcctggctaattttttgtatttttagtagagatggggtttccccatgttggtcaggctggtctcggactcctgacctcaggtgatctgcccacctctacctcccaaagtgctgggattacaggcatgagccaccgtgcccggccctttaatcctctttttaaaacaccttaggatatgatatatccagaataggcaaatccatagacacagaatgcagatccgtgtgccagtggctagggggtgaagaggaactgctgaatgagcgggcgtttcctcctggggtgaccagcatgttctgcgactgcagatgatggctgtgccaccttgtgagggtactaaatgccgccgaatggtacaccttaaactggttgattttatgttatatgaacttcccttccatacattatttgaggctgggcacggtggctcacacctgttatcccaacacttttggaggccgagatgggtggatcatctgaggtcaggagtttgagaccagcctgaccaaaatggtgaaaccccgtctctactaaaaatacaaaaaaattagctgggtgtggtggcgcatgcctgtaatcccagctactcaggaggctgaggcaggataatcgcttgaatccgggaggcagagattgcagtgggcctagatcgtgccattgtactcctgcctaggtgacagagcaagactccgcctcaaaaataaaaaataaaaaataaattatttggaaaaaaaaccagcttaggtttttctgccacctgtttggcaagagtctgggtgtccccacaggccgtcttcagctgttctcctaatgcggtctgtgtgctagcaggagagacgtcgagacatcctctgcccagcaggagcgtccgtcacctctcccaggaaacattcctggctgtccccaccagctccaaagtctccacctctcaaacaccatgtcttctttggtgtctgggacacaggctgttcttggccaggccacagcctcatcatgcatggctctgcccggtggctcacgggctctgtccacaacaccgggggacaggtgctcttatctctcccaggagtcaggatgagacgtgcatgcatgtattgccagcttctcttgggatcctgggtgcttcctcagcccttggccgtcccttggcctgggctccccacctctctggcacccaagactggtggaaaaggaaagccctctcgttctgagttgagatctcagaacccttggcctttctgcagggcctccaaaggcgtctggtggaccctgcacctgctctgcagcgccccctccaggccttcttgcacgggacagtgacagggagttctgtctcagagcgagtccagcagggcctccacagagtgcaaggttgcctgccctgcctgtggaagagcaagccttgtcccctgtttcccagaccccctactcagtggcctctgaatgtccccaatgtgggcccctccctggctgcccctcttgctctccaagtccgagcccacccagagcccaagccctcggaggcccctgccacctggaaagatgacactggggcagggttctcttctgatgtctgtgttttgtcttgtgggccttggggtgcccctgcccctgataagaaggggtttcagagcagaaataaagcctcagacaggtgagcctctgtggcacatggcccctcgagccagccatgcatctgggttcagcccctgccaggacacttgaccaggccccttaccttctccgagctgggatcatgctgggaagactgaatgggacgcagccggtgaaaacgcctggaagagagtaaacgccattttctctaagcatatttatttctttaacaacagtgacgaccatttgtgagccatctctctgtctcaggcacggtgctacatgccaacgaaacctgctcccattgaaccctggccagccagtgaagaaagggttgggcctgggaggtgccactttacagacaggggcaccaaggggcagggtggcaggaggcccaccggacgttccccatgaagtagcagtaccagcatccacacccagcaggcaccacgctggcccgcagcctccctgccagcacgcctggcttcccggcctcggaacttgatctgctccctcttccggacactggggctcctgccaagtcctgggctgggcagcaactgctgaacattctaagaaatccctcccagggttttctcaggagcccgggtggggcaggaagtccccaggggctgaggggaccgtggcggcaggtggcacccagagcagcactctcctggggcccaggctgttgggccagaggcaggactgtgaggcctagtgtagggcctcctgccagtggccggcacctacttgtggggctgggggttcccccagcaggttgggctccccacctgacacactcacagaccttgtgccttggagagccagtgttcccggggccacatagctatgccgcccaggggctgggcctgtcccagctctggtcccccggccccaggtcctggacgctggctccgcgcagcagcaggcggcctccggaggacacgatgtgactggctgccgctacgtcgcactcagatgagtctgcgccggatcgacctgctgccgagtcctgccggacaggcacaggcagggagtgaaaattatctacccctttttatttcttaataactgaatgaaaataaacattggtggtttgacaaataactacatattttcaaacccagccagtccaggggatgcagtttccaggtgcgttatgcaacaggacgccgccgagatgctctgagatgtcccttggctgtctcacgggttgtctctgggttccctcccacccccactctcctttgccaccctctccccagcccccactaccctttcacgcttctaaattcaagggccacactgtcccctgaacagaccaatcacaatgagatccattatagttccaaagataccacgaaaaaaaaaaaaaaacgtggggggtgtccaggaatgcagccgcaccccagagagcagtacaatcagctattgttgtgctagaagtttctctgtgataagaagggaatctagcaatgccgccttctgaactgattgcaaaacagaatagaaagttcaaggccccgagatagctaagctagcagcccctccagagcagccccaggccacacagctgggctttggggctggccagcccctgtccttgcatgcatctgcacagggctccttgcaagggggcccggctccatatcccccacctcgccccctccccatctgggcctggggcggctgagctggcttcctgcactgaggggaccctccggcctccttcctgaagcagctgcccttccccgagggactcccgggtgagggcctcccacattgtctgctttagtgatgctggttctcccacagacgctgcctgtccaccccgcacagatggcatgactgtcctccccttgcccgggcagggatacggcggcacagagatgggggccgatggctaggacctgaactccaagctgtgggccccaggtttttcatctgcttaggccactccccactgcccagacgtcccctggggtgtccggtttgctggaagggccaccactggccttgagctcccagtgtcatttccgggcgctgacgcgtgagggtctccaacaggcgggcccacgggaagtgctttctgtgcttggcccttcatgctttgcctctggttcctgaaatgggcactggaggtgggcacagttactgtccacatttcacaggtgagcaaagtgaggcttagagaagctaagtgacttgtccaaggtcacacagcaaaagaggggcctcgaacagaactaaagggcccatggtgcacaggcagaggttgccatagagcgaccagggccttctcaaatccggctgtgagcagaaacttctcccgcccccccgggcccaccatggtgacctgtggagtgcctccatgcgccgagatcgcttatcagcccatcagcactggtcacggccacttttatggtctgtgttctctcgtgtgtctgtattcgtgcgacgttccttcattcaggcaatatttgctgagcatccaggaggcccccgtttattcatttatcatccagcaaacaccgcgaggcggctgccagctggggccgggctcggtgcgggctcccgggtgggggcgggcatcacggggcactgcgtggcggatgtggggagggtcgtgatggggagggacgtgctaggtgtgcacagagatgctggggtgcaggagcgggtgtctctctgagcacatggcccggaaactgagggctgtgggtgcactaatgtgggggagagaccaacttcctttcactggagccctcaaagtttctggcagggataaccaggatcctagcgtctgacactaagttcagggaggtcacaggacgtgctggaaccaggagttcagggttcaagcccaggcctttctcctcatattgaacgggcctctcctggtaccatggggtgcccttgatccaaagcccccagtgaggaacatctcacggtatgtggggatgggcctttgccatagcagcccatgcaaggccttggggccagagccagccccgcagggaccctccttgcactattcttcacatacaccattgaggacaagaggaagggacacccctggcctggccatgtggtgacagctccctgtgcattgacccccaggggtgctgcgatctaggagtggccatgagacgagggggagggagacactttcccgatggtgtggcgggcaggtctggcaggcagggttaggcggggtcgtggaagaggctgtcctggcccagaggctgccaggcctggcctggggctggctcctcttccaggaaaggtgtgaggcctcttgtggctcagcactttggaaagtcagccaagttctaagcttacaggtgcatgaaggttccatgtctgtggtttcaagaacataaaagtggggtgggaggccctgggaggtggtcctgtgtgggggcagccaagtagggggcgtgggatggggaatgaggtaggggatggagtaagatgtgggagaagtgaagtgggggtgaaatggggaagtgggagtgggaggggaggaaggggcaggtgctgggaagttggcccttgtggccctaatctgtctgtgacagcttccgctcctacccatccacagggacaagaacaagtatccccttccccagcctgctccctcttaaaaaaaaatcctcttcctatttagtatgcaacaggtgctcaatgtgtgctcctaccgttctccaggaaaggagggagctaagcaggacacagcccagagctcagcactcccctagcctcccaccctcacctcccaaggcaagggccaaacccaacggtctggctggggacccccaccagcctcccccaccatggatggaggtggcacgtcttgaggcccagagggggcagacatgacgtccaaggctacacagtgagtctagaccacatggcctgctcctcacgccctggagaaagaaaaggcagcccaaagcagggagggtcatgccccacctggagtgggccttgatgaccttgacgtccccttcccaccttgaaatatttaacaattcttccggagtttccccaaggaggcctattcacacaggcgggccatctgatgatctgcccctggggggtttctcctgcagccacctgggaggggcgtggcactggacagggaggtccctttaccccacacaagaaggaagagccgagtaacccaccctgacgggcagtccctccactgggagctggggccagggtctgggcgaggggctggagtcagactgtgggagcacggagcccaggatctgagcctgcccgcaggctgcctgtcttctggtctctctcctcctgctccagcttggccgagccaagctgccgaaggccaaagagcagcatgaactcctaagagtgacccaaataaaccttcttttcaagaaaaacaggccctgcaagcctgtgggtccccatgacaagggatccatcaggcagacagactgcacttcggttcggttggtgaggactctgtcccactccgccagcagctcccagcctgctgggccctggccctggtggtcaccgctgtggcttcctgcacccccgccccgtagagagctgcagggagcccggggtgctgctgctcttctgaggcgggagggtctcctgcctttgctcaggttttatagagagagggtgggctggacagggacagacaggggctggcggctgagggtgagggtggagggagtggtgcggtgtcccggctacaggcgggctctagggctgggctgggtgagggcttgggcagggtgggtggaaggctcagaggggcctggggccagggcccggtgggtccttcgctgccctggttggggtggggtgggtcactgcagggaattacagcaagtgggaggctccaggaggtggggagtttcctccgacttttgggactctgaggctcggcctcctcttgcacgttctccagcctcctcgtcaccgccaccaggttactacctttacccgacgcacacctgacgtggctggatgactgggcccgggggctgctgccccttctcgcaccccgcccctcccctcccctcccctctcctctcccctcccctcccctcccctcccctctcctctcctcccctcccctctcctctcctcccctcccctcctctcccctcctctcccctcctctcttctcctctcctctccttctgtgcccgtctccagccctctcccgttctgcgcgcccctccttccccgacttgggcagaaccgcacgcagcggctcggaggccaggcgtgtgccgggcgggatcgcgcgcccgctggggtgaaatcaaaagaaaagcaacaaagccccttccgcggaaaatggggtggatgtgagcggcgccggcctcttcctgctggaatgggaattagcggcgaggattattttgaggacgcgaggtccctttgtgcccaaatgcgcctcctcctgcccggctcggtggggttcgcggcgcacggaccccgcccccaaggcctcaggtgggccgggggctccgggaggcctccgccgccctccgtcccaggagagcagttcccggtgagaagcccgggctctgcagacaccccacagcagttctgcgtctcggaaaacgcggcgccttcatcaggaccgcacgaaggagggggtggggaggcgggtccagcctcgcgaggagccggccggggtctggggggccgtggcagaggggagtcccgctttctgtctaagcctccctgtgccaagtaggcccgaaccccacctttggaacctgctttctagaaaggacagcaccccagggggcccgtgccgtgggcatggcagcctctcaggtcgtggggaggggaggggacactttggggaagccacagggggtctctaggtatctctgggatgctttctggtggggtgtttcctctaatcaaaaccatcgtgggccagattctggggagctggcagcccccccacacaaacagaccttggtgtcctggatcagcttcaggtacctgatggggtgagaggatcggtgcagaggctcagaggccaggccagtttggtgacccatcagctgaatttcagactccgggtccccagccccttcagagacactgggaccgctttggggctgccctgaaggctccagagggtggaggggaagggcatggtgcttttgctaacactctcacgtcccctgggagcaggtgggtggccaccctgaggccactgcacgggggaagggacagagagaggtggggtgggggaggcggaggggaagctgcaaccagctcccgtggggcagggggtcggcgggggtttgtccctgctgtgggcacctggagcgacacctgtgggggcagctcctcatctgacctgcactaacactaatctttagtcagctccagggactcacccaccctgaaagaccccatcctcaaccctatcaatagctctagttgcatttccggcaaaatctgcaagagctcggttctttgtctaaccctccagggaaacaaacagttcacctcccctggaatgtcctcatccccttcccggggtcccaacaccctccccagcccccaccctactccatctcaggctggctgcctctgaccctaaaagtccaattctgtttgtctgccgggttggggcactcatctgtggcccagccaggcagaaagacagagaaccgggggaaactcccgtctacatgaatcatggggcagaacctggggatttatccaacaaccaagagggcgcctggactttgaagaaaggcagcacttgcccagaggagactgtttcaggagctagaccccaccctgctcttggggtgggtggtggcatttcccagggggcacctgggctcttgcctagtggtctggggtccctggtactttatttctaaagttgtccacatcagcaggaggtgagtggaatagacagtggaggccaggtacctggaaactgctccaggggctgtggtgggagggtgacccaggtgccacccacctgagatgtggtcatggttggttttgtctgagctggttgtttgcttgcagagagggaacccaaaggtcacaccagaaagcaggcttccagtgcagtgaaggcgagggctggaaagccgcacccacccccgcacccacccctgcacttgtgtagtcctcacgtgtcctctacatcctgggccagagggagaggccccttcagcagcggctctcccaacaaagaggaaggcccccaccaagagcacgcactcagaaccccagagttctaggaggcagaatggatggcaccaagaggtcagcggtctagagtgggtctcccagagcccgccccgtggcagcacctcatgtgaccactggcgcctttgcccaggttctccacactggaaaagtggagaatggctagatggtgccccctccaataatccacaaacctgggtgacacttattatccttcagtctttattttaaataaggcccctgtcctttaccctcccaaagtacttttagacattttccttctgcccagaatcctctgcccggtcccctgtagctagtgtccagacactggtcacagacctccactgagcccagttagagcgctgacctcccatctcaggacttcttggcccttgcccattgccatactctactgtcagattttaaaactgctagaccatgtgccaattcacattgacttgtagccactaggaccctgtgtctttttctattgtgcttgttcatggccaggaatcaacgaactttggacagacaatcagtagactttgggtgtggccttggtgaaggcttcccactttggtgacttgcatgtgcccctctttgttgagggggttttgaagcagcttctgcgtcattgggagctggctgctgcgcccagcctgaggccctggaccccttttgcaccatcctaatttcaacatccagatgtcaattcagaaaattattatatcattctaatgactcaaaacataaaatcccctcttttgtctcatgttgaagagctgatgacatcggacctatcaggtcagacttattttcctagtcagagactgaatggcatattttcaaagcacttcgtctaaattgcatggcacacaccccaggagcccaaagatctggttgttctcttgagatgcagagaggaggcccacaggtggcggaggggtgaaggaggaggagccaccacttccgaagcatcagaatgtcaaaatctaagttttccacgaggtcagcagcaggtgtctcctggtctggagagggcatggaagtggccacaggtctggacttctctgggtggatgtgagggagggtgattgaactggaggagggggctggcttgagaccttcctgttctatgttgggggggatactgagggtccgtctcactgggacgaagagggggcacagatgcaggtatgcccaggtacctgagtcccagccaaagcggcaaagccagacctcccgggattccttgagtttggacaaagggtgtcccgacgacgataaagagccaggagcagagagccctgcatcttgcctggggccccttgtatctctggctcatggcctgtcctgggcacggggaggaagggagacacccgtaataataacagagaccgcactggactatgggggatcacaatgggtttcagtttgattgagagaaaataaggtaagggacacgtgctcgcctgagtctctggagtaagagtcacgccttggagaaggagggcagccaaaggccacgcagaaattgggggttcaaggtttgcccagccggccccaaaggtgtgggggtccacatggcctcacccaggggccagtggggtggctttgctcatttgagggtgtgcagggtacatatgtgtctgccccgggaatccaagtagccccagtgcgctcctgccttgcttccctagagcgagcccacggtaccatagtcctcgtgggatgaatgcatgaatgatgtggaaggagccagaacagggctgcagacaggatgctctctcatagaaggaccccagagaacttcccctctggagcctgtgcggctggttgagtgtaaacgctgagtcatgctcgctgcccagctgtgtggcaagggcactccctaggcactgagcagccaccgccagccctgagggctgcgggacaacagagagccgggcctgcccgaggcacggcccctgaaaagtgtggcccgccaggtggcacctatgttctcttgcccggcgtgggtgactacacagttgtcatttacgggggaagtagggcacagcagaggtgaacatgaggatgatgctgcgtctgggctgtatccagggaaccagctgccggacaaattggaagggaccttcttggcaggacaggtccagttggtggcctgaggtggggttgtggtgggccttgtccccctgcagggctgacccgtgcaggtgggatcatccttcctgaggagctgccctgcccagtcccgttgccttggaggcggtgacatcaggggcccctgagccaccaggttcctccatcttcatgtggccaccacggctgttgcagagtccacggtaagagccaggacgtggcttccaggcaggatggggaagcacctcccactcccacatggacaaagatttctttaaacggagccaccagccatgcctggtagtgggtgccctccctaggcaggcagtgctggctctgctctttcctgggggaagcccactgctcctcctggggcctagtccgtgggacctgcccagccagccttgggaggggcacccctgggcatgtggagaggaggtgatgaggcgctcagatgtcgaggccaaggccaggtaggtggcaggtgagacaggcccttcagacatgagacccgagtgatgtagataagaggtatgttcccctccagcccccgcccccaggcaaaaggggaaaagacacacagagaacaacagaaaacagttggaaaccccaaagggcgcttgatgaagagctggagctccccgccccccgtgctccgggaggaccaggagacctgctccatgggccaaaccgcctttgcccatccctcccctgacccctgctgcacggttccaagggcttggtagggcagcctgaattttccctaactcccactcctaggaaggtcaaattcaccttgtttgcctccttaaaaattcacaaatgcaggactgaggcttttcctgaaaccagagccccggcagccaaggctcaataaaatactgtttgtgtttccaggcactggggtgggagcgaggctcccagttgctcagagttaaccggccctttcccgagtgagaccccgcgagcactcgtcaattctcccatcaccctccatcgccgcctgctgggggggcctgaggtccggagctgctcttcctcctggcagcccagcctgcaggcctagtgctgtccaaccacagcccagagggcaaggcctcccaaagtgggcgcttgctgagcccctggccagcctcccaggaccctcagtccccacagcccccatccagctctcttttacaccttcccctcccccatctcagaacatgggagaagccgggcacactggcgtctgcaggctgcccttgggctgccacggggccctgtttgcccagcacagagcctgccgtgctttgacccagcaagtcccaccgcaccttccagaggcactgtacagcgtgcatctgttgtcagtacagttttatttgctgtggaatccatgagagccggaagcatcgttggggccgtggctagcagagctcatggtgaccagtcctgggcctgaccaatgggtgattacatttaaaaaccaaaacaaaacaaaacaaaataccaagaacagatcacttgccatggacatcagtaatctattggtaatggtggaaatttcatgaaaatttcccctaaaccataacaaaaactgtcctccttaccccaaaagtgctggaggaaagatggttgcatgacttgacctctctttgaacttgaaatgctaccttcctacccggaaatgcgacacactatacttaaaaggccagatggctgcaggctgtttgcacccctggctctgcccagggacacccctctcctggttctaatgctcagacccaggaggcagagtccgcagcccgagggagcttcaaggccgaggggtaggacctgcagggcccacaccacccttctgatggagagctttgcacatgcattcacacacacatgcctggcgggatcgcagaggatgggtctcgtggcaggagtgggcagaatggggtgcattttacagaagagtcacagagaggctcgccctcggcggaggacacacagctgggtgggcgtgtgggagtgcaggtgtgctgactccgaaccaagggagagctctccgtcctgagctcgctgcccctcacgatgcacacggctgatggctgaggtcagcggtctcttccctgagtggcaggtgtggtccctgggacttcataaaccatcctcatgacagttttacacttagagtccccaatgcactcccaggaggtggcctgggcaggcaggcatcattattctcatgttacaggtgaggaaactgaggctgaaggaggcagaaggccacatacccggggagaatcgcaggcagcaggggccaggccccttccacagcactgcctctcacccttctcccgaccaacccccaagggcatgcctctggcttcatgaaccttcgggggaaattagctttctagtttgggggcggttccctctgactggagacaggacagaatgctttcacacccaggaacggccgtgcagcctggcttagaaacaagggacgaagtggatcctgaggctcattccctggggactccaagaatggggcaggcccagctgcgcagccagtcctggctccactgacttaggctgcacccctgcacatatgtgtgtgtgtgtgtgcatgcgtgcgtgtgtgcatgtgcgtgtgtgtgtgtgtgtgtgtgtgtgtgtgtgcgcattttcccaggggacctctcctccttcctctgaggcaaagtggcctgcaggggcccctgcagagcatacagggaggtgcttccttccctctgcccagcgagcaaagggtggagccttggcacccccagcaaccccctccaagggtggagccttggcacccccagcccccaccccgcaagggaaaggggaagctgcacgaggagcaagatttcattccccagagggcacagcttgggcagattcccatcatctaggggctgtgccccacatctatttctgccaaacaagaagcagacgagggggctcaggggggcgggcctcacaggaacggaagcaccaccccacctctattccctgtggcctccaaaagagctgggcaacctctgccagccactaccccttagcccaaggggagtcctcattccagagccagcatcttcatcttgtcctgatgccctgcccacccccgccgagcttcacactgggctgctatggaaaactgaaaggtcagagggtggaggtcctctccctcctggacatggaaacctccccctgcctggcacttcggctggtcaggaacagtggctgctcatggagctgccctcccaccttcagaccctcctcctcccccgcaggggtgggctggggccctccctccctctgtacttgatccatgacttgtgagttctgagtcctcagggccgagacttgagtcagaaccttctggagcagtacgcatttcccctctgcacctggtgaggacaccaggctcctcgcttcctccccagatctctgagtgctcacccgaccccccaaccctggcgggaccttccagggctggcaagcatcgagcctgaccacgttgcctcttgggtgccagcacgcccacatcaaaggtgtcccctcttcccagaggccctgagcaacatcgggcgacgctgtcagcagacattagcagcagagctgcaccacgcatcaacttttaagtatgcgcacacacgtacgccagccaataacattaagtgtcattttaaaaaatgggttaaataagcagcattgctgaggatggccgtgcagggctgattatcccctatttgcacgttctggcggtgggaaggctagaagtctaatgactgaattatcgccctaatgcctctcgctggctgggaataatcccggggcaacagctgccgcggggtttttggctggtttcctctaattgcatccagattaagggagttgtggaggggcggggcttctccatcccccgcggagcagcgtctcctccgccaagccctgaacacccagctcatggcttccgaggtcctggctggtccgagaggtgcagacctcactggggtccgggccagcccatggggagcgtgaggtgcgagcagtgcacggtgggggtggcacttggtgcagagatgcagctgattggtccgggtcaggtcttggggagcagcaggggtgagaagctgtagggccaggagactcagaaggaatgccttctactaggaccttcccaagtgaggggagccctggacctgtctatcctcttcctccctcccaaacacagcggttcaaaggcacgaggtatctagtgaaatgctaggaccagggacgctattcccctggagcaggcgggtggggaaggagtgctccaaagcaggcattattaggacacagactctccagagtcccagttgtttagccctccaaattctcagcctactgccacccgactgtgcagagcggacaataaagtggcaggcctgtcccccaccccttaatgctgagcccagccacgtgacttgctgtggccaaggggagagctgcaggtgtggtgtccaccaaggcttggaaaggcacttgctgtctctccctccgtgcctttggctgtgccatggctggcctgcaggagggatgcaagagaccacagagcagggccaggtccgacctctgcaccatgagcatcccctgggacttaacaacccactggccctaaacaaacaagcccagcctagaccagaagaatcaccctgcccagactgctgactcctgccctagatcagtgctgactgttgcaggccaccgagtgttggcggatttgttacacagtattgctgtggcaatggatataactggtttctagcggagggtcagggcagaagctccagccacctccctagcccagaaaggcaaccctctcttcccagaagcaacatggatgagaagcccaccccattcccaccacaggatcccccactgctagacagcaatggtcggtaccccaggatctgggcactgatggggctccaggacggtctcctcaaaaggctcttaggcagacagacctgggaacttggaagtacctgctggacgacctgggttcatggagaaaagagaagccgagaaggtggaggaggccggtaagtggtgacctccgctttcctgctgaggaacactgctttgaagtggcatggcccagcagtgcccaccctccagggagaaaagctttgagtgggaagaagccttctatcctggtccccatgatggttctcagcacatcaagggtttttctccccagaaggacgcgatggaggatttcaggagggatttggtctcctcgctcaaggagtggctttctgtgcaaatggctcgacacttctaagctggctgggagttctcacagcatagatcgcacacccttttctgtccatctctaaatcccagaaggagcaactgatacacaatcttttggaagagggagagtctgttgggaagacctcattcccacatagaaggcagagagccctgagtgctggctccttcactgtggtcgctctcacgtccgaccacctgagaagctgacttacatatctgagttcacaggtcctgaagggaagtggaagagtctaactatttccaggtgtccttgtcttggttggtcagctaatacactaccacgtccctgggacaaagcagatcattgtcagaggatcttgcaaacacaaacacgcacgcacgtgtgcatgcatgcatgcacgcagggacacacgcacacatcgacccattcaagccccagctggttgctgtatttggtggagttgaccttaaacaacgccaaggaacctcacgtagaagacccccagcaaagaaaaaggcatcagatgcttctccaacagcctgaggctcaggctcctgggcagacagttcccttcgtgtaccaggaggacgaaatgtttaaacggataaacattacaagcgccagctcctcaagcctgactgctcttccgcctctctatccccacatcggttgggctttttatcttttgcttttcttttatggcagatgcctttccatcggcatcccagctgtggctggggacgttttgggaagtgtgtttggctcactccgagagaacgaggtctcaagaggaagtgtgtctggcttgcaaagatgtccctgggcctggacaggaccccgctgtgttctgcagccctcgacgcagtgggtgagtgaggccttcctctcctgtctctgctttcctcattgcctggcgacgctgtctggctgccctcgagggtggagcaaatcctgggacatgttgaaatcctccagggcagccagcaggagagcccagccagcctgcgtctcaggtgcggtggctgcgcgttccactgcagcgtttcaggagctgactttcctctgggtggctgtagatctgacttctgtcacttccagactctaattttgtcattaatatgaaaaggttcctctcatgttgcccaaaagcattttccttaggtttctaccgtcccctgtccccttcacgcccagccccaccccctcccgtgcccagggcctctgaggaggtcccctcaacccctgtccggtgtcgggggcccgacctatctgcggaagccgaagccgtcctgcggcgtctttgggcccttcttgccttccctcagggacttgggggaaggcatctccaccgtgcccccgtagggacagctctccgagccgggatggtggccggtgcactccaccgcgggcatggagccgctgtcccacatgcctgacccgcacagcttacacagatcgtgcaggctgcaggggatccggggcaggaggcggaactggtacagcaaactcctcgcctgcagacagaggacggggggtgaggaggggccgggggacagcctggcagcctagggtccccatgggagtggccaaagacagcaacagcagcaacaacggcctgcacctcgggggctcaccgagtcctggactgagggctctgcctgcatctcccaccatcaccggcaccacggggccctgggtcttaggtggctgcagtgatgggacccacaaggcactcgggctgtgctcacaggtggctcgaggtgaacaaggcccttgaatgggcttcattcaggagggtgaacaggaccaacaccagcacagggccgggtggcgtccagccaagcccacctgtccctttggcagcacccctctcttcttcccccgcaccttgctccaccccccacccccagcagcctctcagctcctgcaggatctgtgtcctgtgccagaggacaccaccgacctcgggacccccgctcagtgccctgaggaccaccagagagctaacgggcagcatctccaggaggcgtctgggaagtgggggagggggccaaagcccaaggtccccagtattctggccaccctgtccccaggtccagcctccttctcagtgttcccagttctgggttgtaagcgaggtaccccagggtagggaacctgtcctgtccgtcagccccggtgaattcgttccctcctcagccagcgagggaggctcctgtgtcagggctggcaccccaggaaagtgaggtgacacagccaggccgagacaggtgctgaccacgaggccttagtggggagcccccagtgctatgggtgggggagggcacgtgctggggggccatggtggggatggggctctgggggcggggcccacatctggggcagcctcacctttctgagaacgagctggtggggtggggctttgggggcggggcggggtggggcccacatctggggcagcctcaccttccggagaacgagctccccgttcatgtgcatggccaggtttccgaagtgcaggagcatctggtccgtggccagctgctgctcgatgacgtcatccccgtagatggccacgatggccacgcagatgaaaaggtggaagtagtccgtctgtggaggcgggtagagttcagacacgggctctgaccgagccccaggccctgcactcagggggaaactgagtgccagggtgcgagtgagggctccagggcgaggggtctgggctcacagcccagctcgggggccgtgtggccctgggcaagctgcaccgcctcttcggccctaagtttccccacctgcacatggggtctgtcccagtacccgcatgcccaggctgctgtgacatccagaggggacgatgctgagctcagcccccacgggctgctgctgctctcctgggtggtgatgtgggtggtctccatgacagggtgggggtgggggggtacaaagagcacccttcctcagaaggcctggcctgtgctcatggggaggactcatttgtaatggtcctgagcaacggtgtgtgcggaagtctgggtcagaactcactccagcgggtcatggaatgcgcctctggcagccacccacgggtcagcctgtcctcctggctccaggccacaccccccaatcatgccccagagatgactctagggtttgtggctagaaaagtgggaagatcctaacagagcgggcacagcagctcacccacagggtggctgaaatgatcgccctgtccttgagcctcttttcgggcatactttgaggactccgcagccctccctttaaagaccgcctcacggggcctgccagcaacgcgctgtgtgcagcaggaagcccacgccaggtcctgacggctgcatcctgtgtgctctccggcctggccgcctcaagacacgccacctttgatgcacacgcgcttccggaggcacaggaaggacgggggcactgggaagtccatgtttagtctcctgacgtcgaccacacaaaccagacggaacggtgtccccggcccaggctgagcggagcacaccatgagggcagaggctacaggtgactcccacgccccagcctgctcctggagagaccatgcaccaggctgcccggctgcttcctctgaactaatctgggacggtcttgttttggctctgacggatccttttgcagtgatttgaactgtggctggtgcgagacacagcggaggggttgcaggaaggtggacgcccagcttctctgggagaggaatgtggggagggagagggagggcacgatctccacagcctgcacagcataggcagatttcagttcccaggacaggcagggcgtagggccgtccagccccaccacatgctgacagcggacggatagcatcaaaagcctttctcgctcaggggtcactgaacagttaaaggcctcacctggcagcaaccttcccattccacagagctcactctcagctcatcagcagcccacccccacccccaccccgtaatactaccaaattgatcgagggatgggaccgaccgtggctaaatcaagcccacagtctgaaaacaacagaaacttgctttgtggacttccaacacaatggcagccaacagagatcccacgtcacgtgggcctcccgctggaattctgactagatctcattacacttgggacacagtaggtgtccatgggaaagggacccatctgccgggccacgcgctgagttcacgggtaacatcagcctgaacgtaaaggaatgagggcggcaaatctgccactgggaaaacgtgcaatgaggcacgattttttttaattcgggagtggtgggaatgaagcctctcagaccgtccatgccgtgcttcccttcgttaatgcagatcgtccaccctgcacgtccacgtccagcaggctgagccaggagggaaacctagacccgggccaggggcgagccgatgaccgcatgcaaaggcggcgtgtggtaccggcactcggtggcttcagactcgctttcatcagacatcagccccctgcggtgtgagtgaggacaggagacgctgacgcaaatgtcttccagcagatgggtgtttgcctccatcttcagggttctctgacggaggctgctggagctgccgtggtggatagagccagctcctgcaaaagggtccagccctcctggatgcgtcgatgtgagttttttttttaaaaggctgatggactcaaagagacttgcttatcttttgacatctccagcttgtccctagtttgggcgttaaggccatgtgacagagccagtgctgtgctccaaggggaatttgctgagaagatgctggtgacggtggacggagagtggaagtcggtatcactgattggggccctctggaggggccgacagggaagtgggatctcaggccctttctctgcacagcagggtaacgggtgagtcggccctcgtggcagggcggtcccgagggggtggagcggtgctggctcacgctcgtgggcaccagcgtcctgggctgctgtggcctagtgtaggccccccacagtgtcactcacactgattggttgtgacaggagggagctcagccccagaaagtggtaatgagtgcagtcagcgggcaatttgcatcgatttcagtgactggggaggcgagctgtaaggtctgaagccagccacgtgggacgggaaggcagtcgccgtatggggggctaatgtgtggctgtgggtggggggcggcgaggcggacaggggcagcaggcagggtggccacggtggttcaggggccatggtcccaacctccccagccctggcccctgccctggtcacctggtagtgggcccagcaggcctcccagatccgcagcgcttcggcctcggggaactcccgcttgaagcacagaaggagccagcggtggcagaagagcatctgcaggccgtcctcgcccagcgagaccaggtgctggtagaagcgcacgtgcgtcagccgcagcagctcgcgcaggtacagctgggggtgaggccgtcacgcgttagttagctccggtcccatgcggcctgctgcccaggaagcccactcccactggggcccttccctgggccaccccagcctggaaaagcacacccaggggcctctacctgctgcatgtgcctgcccccccaacgctccattccgccgctggaatcggctcacacctgcctctgccagttcctcccagatctgactgttccggaggctgtggtgtggtccagggtgaggcagagtgttgtgcccgggcgtggcaggacgctggcagccgctccatggccaggaaggctccccaccctcagtgcacacttgggggctgtttcccacgtccactcctcctggtgaggtgagtggatcatccagggagcccccccacccctcttcggctacgctcacccagatctatcatcttccagagctgttttagggcaggaaggggacgtatctgagccccaggatgctcgattcctgccattaaggtcatctcccaatgatgtgggacaagatcggggctatttctggcagcactcgggcccaggccgctgacttcatcaatgccgctggaaaatcaatctccagcattcagtgagtcacccagccatgcgctgccatgagccgtcagaggcgaatggcgttggacactgtaactgcctccccaagcaatgtggacacccgacgtcacacacacccgttgatgcagagtgagcaggcttggctgggttcagccccccggcccaggtggagttagatcacagctggggggatcctggggcagagctcggggccacatgcccccttcccacacaggtggcccattgttcccacgggagactgcgctgaagctgtgcggccagccctccgccctgtggcctacggccaggtcaagcccactcgtgtggctgacccccttgcagatgctccactcccgccccctgtgcaggtgcctgcacctccctgcttgggctcctttgccttcaaatcctctctgttggcatcagctctcccagcctgtcatcagcgacccactaacagtcagtctatagcagcggtccccaacctttttggcactagggacccgtttcctggaagacaatttttccacggacaaggtagtgcgaatggtttcaggttgaaactgttccccctcacatcatcaggcattagattctcataagcagtacacaacctagacccctcacatgctcagttcacagtagggttctcgcgttcgagcttctgtgagaatctaatgcagccgctgatctgacggcaggtggagctcaggcgggaatgctcgctggcccgtccaccgctcacctcctgcggtgcggccagttcctaacaggccatggaccagtaccagtcctgggcctgggagtggggatcccattctatgagacacactccgtggcctggggctggggaaccccgttctacaagtcacactctgtgtcctggggtggggaccccattctacaagtcacactctgtgtcctggggtggggaccccattctgagacacgctctgtgtcctgggggtggggacccccgttctatgagacacactctgtggccctggccttcaaggccctccatcagctccaccctcactacttgtgacgggtctggtccaggaagaccaggtcactcagtcccaccactgggactgctctgctcagcccagccttagcgacactcagggccagaccccacacaccctggagctgtccccggtgcaggagccctcttgtccttatcacgggcacctcccacagtgctccccgacacccagcgtcctctgctcacaatgccagcttcctggcccagccaggagggtgaatgtctggtgactgcacccggcaggcacttggttgacatgggtgatgtgtgctgagaacagtgagcaggtgccctggctcagccctggttcggtcccacacgctggccctccggcgctgccttacccagctgggctcagccccaccaccgacattcagtgcttcctggtctacatagggctggtccttttgaggaggccttgacgggagaggtgtcagcagggcaccccaggggaggggtggggtgtgaggactgccccagagacctcagggggtttcaggagcccctcctcttcctgtctgcactcagaagccctggctgtgttgactcctgcagggagcagcttagacacacctgaggacccattttctaaggctcagagggggctgggtgtgatggtgccacgtcttccttgccagccagggagcttgggccaggttgtcacgtgcaggggtggaaggccaccagagcggcccacacaacgcggcctctggacctgcagggagtcagagggccatccccggaggccgagataggctaagccgcccatatcccacgggcaagtcctatcctggcgttcccactgcccactgacctacagcagccaagccacgcatcaccacggcaaccccggctacaacgggagaggcaacacgggccctcacatgcccttggacgcacccatccccctgagcctcaccagttgtttctccatgtcctcgtcccggggtgagctgacgaagatcgtgttctgcatcaaacccacaaagcaccagaaggtgtctgactcatccaggacctcggccaagatgggcgccaccaggtccgacatcccttgggaatagccgacggcagggttgtacacggcgtagttcagcaggatcctcctgggaggcggtggagacagcagtgggtggggatgaccctcaccgcggcacactgcccagcctgcagaaccctgggccgtggaccctgccttccctcgcttgccttcacctcagtggaaggcagctgtgccaccatctcagagcccaagcttagcttccagacacacagacccttgctttgcaaaaggtaatggcctggccgggcgcggtggcccacgcctacaatcccagcactttgggaggctgaggtgggcagatcacctgaggtcaggagttcgacactagcctggccaacatggtgaaaccctgtctctactaaaaatacaaaacttagccgggcatggtggggtgcacgcctgtaatctcagctacttgggaggctgagactggagaatcgcttgaacccggaaagcggaagttgcagtgagccgagatcacaccactgcactccagtctggatgacagagcgagactccgtctcaaaaaaaaaaaaaaaagtaatggcctgctattagctgctgtctaggcccagaatcttgagagcaggggttaagggggaacatggctctgattttctgaagggtggactgcctgtgacaaggggtgggctggcagggacatttctgtgggctgctaattttgtgcaattatttgctaggctgtagcagaatgtcacagatgccagcctctggctctgtgtggctgtatgactacgggaccacccacggggagatggagggggtgcatggggaagctggtccatggttagtgtgagccaagcaaggacaggcttggtggtgcccaggggatagaggggctctgtgggcagggacctgggtggcttccctgggatgccatggctctgagatgccaactgacgtagctcatgagtagcgtatccttcacttctggggctttgatgtatgaacctggaagagagcccctgcagaaactcgctgggggctcatccacttcccagagcggtcaggtgaggcttgcagacttgcagatgggaaaggagctggctggggagggagtacctcatgctctccacattgggattgtcttccccccggaagaactggttgttccgatctgtccggaccacgtctttgtccacagtgaactgcacattacgccagaacgctctgtgctcctcgggagtcatggagagcctgtgtggagccgagcacccagccggggtcagcgggtggcacccagaggcatcgtgtggcgcacacactgcaggaagccacccttcctcccaacccccgttccctggacgggagctgggcggctgctgccggctgcagaccctccccggatgcggcggatgggtggcgtgtatccaaggctctccttgatattaactcagcctcacagtctccagcgtcccaggaaggagagcaagttgcagcccagtgggtaatgaggccttggccctggcccagcgttctggaggggagctgagcacagcccaggggcttcacccagtcccagcctcctggagagagagctgagcccagtcccgggttagcagatcccaagtgggacacagtctccggatgccttcacccctccaggccctgctcccagccccagccttcagctgtgggacgtcagcgcctagttaagtctgttgaacgagaattctaaaaccttgacatgtgagctaacgagccccgcagctccgaggcccgagtgcttggtttaatgactgcacttatcccaccctatcactcacgttcctgggagacccatttttgaaagaaactatgggtcacgaaacatattatcaatgctgaattgcacctcaaattgccttttcaaatgacattttcctccgcggctcggcggggtgggccgggctggccccggcggttaccttttctgctggatctcagagtactcctttcgcttctgcagccgcagcgcctcccgctcctccgacgtggactcgtggctgtaatagcgcagcaggaagggccagacctccccgcggattgacacatcaataccgccaaagaaaatggcctggaggaagcggcaaaagttggggaggggataaaatggggcagctcaaagaacccccaaatccccagagatgtgtgttttggtggtttttggtgcgccttgattcagatctctgcaatttgcacatatttacaaggggaaagcagtggccttcaattcccatacaggacacaaacccggctcatttcaatgtcaatgccccccctggggtggcgctcagattaacgtgtcgttctcacgtcatggcctaatccctggttttggaaatgctgcatttcactgcaaacccttctatgcaggctgacacggtatccccccaaaccctcgagggaggtgttgtgttttgtttttttttttcaacgcagcagctttgattgctttatcggtgtgttcacagagagcctcacacaagaaaacggggccctcacgaggaggtggcccgtgggtgcgggcgggcggccaggccccggccctccttccctctcgctcgttcccggttcccggccggctctccgcggggccagctgggcggacccggacctcaccttccgcagcttgtactcctcctccacctggcccagctcattcaggtggttgagccaggcggagacgccgagcctcttgtacatgctctcctcggggtgcgtctcggaggacggcagcttggggcggcggatggagaactgcatgcatgtcttatcgggggcgacctgctggacgggaggaaaactgggcaaaggtcaggatctcagccgcgcggcttcagaggccagcagtgcttttcccaggaataaaagcctctctctcttctgaaaggagggcaagggccgtcccctgcatacaaacccctaaatggcgagtgtaattaggcgcaattaaaatgaaaataccttcatcttaaaatcggtttccctctgcggctctctcctccccggcccactgtgccgccgccccccactctctccaaccccagccgcaaaaacggaatgaatgcctcgttcggcctaacttccctctgccgggagggcctgcaatgaattacatgtgattggccacatacaaagggatcgctgttctgcgagcagggagccagcctgtcagattgcctccgcgagcagtcacgaatccagggcaaaactgcagctgacatttaattcaaaaatcaaaggttgttcaatgtagggggaaaaaaagccatgctactgtaataagggaagccagcaggaggctctgcgggaaggaagggaattttaaaatcggccccatttctaataagcacatacagtaccttaaacagataattaaagagctcttattacatttgtacgtagattgagcaaaatatggcaggaagtcttgtcaaaacatgatttttcaagtgcagggcactgactttaccgaaagccctgggcaaaggtttcaaacccaaagttgctgctctgacggccaaaaactaccgtgggtcacaccccgtaagcccccggggcccggggaccccagacacaggacccaggagggagatggggcccgtggggggtggggagtgtcaaccgctgggcattctggggccgtctgctgggctacctggtctttgagctgcatctcggtgcagtatttccactgctggaacacgtcagacagcttgtccaggccgccgtggtggaagtggaaaaccttgtactggctctctcggctggcaacgaccagctggccgctggtgcaggcctcgtcgctgaagggccattggaagggggagagggaagcccgatgaatatgtaaacacgggggttttatttccaagtataatcagaggccactgtcgccaacctcagaagcaggaaacagtgagtcccagtggagttggctgctagcgggaggggacagaactacaccgaacaaaaaccaccaccccctttgccgaagatggcaaaactgctccttcctggggggccctggagctcctctctggagacctgccagagtggccttctccccaccaccccctgcccggcaacatggtccctgcagtccgggagacctgggtcccaacgctgagtgccctggaatccagttctgagccctggcaggccatgtgctaagagaacctcctgggaacagacctccttcgttgcgtgtgggtggaactctgggagaaccctccagggaaactcagtaaacatccgtcagtgctgtcagcccagccccggctgcccttagatgaaaggctggaatgtggctctgggtctgggaacccccccagcttctggacacgccggcttcttctaagcccgggcctctcattggtgatgtctgcggctgggcagccctgactataaggaggaggatctggtgtggggaatgactgcaggaaactaggcatcgcccacccatcacgaaaggaagggagcctccatccggaaagctgcggcccgtcccgcacaggtggccgagctccagagcatcccccggcgatcagagccgccggcagctgctaccctctgccctggtttggtttcttctcccaagccagagttgcaagcaaccgctggctaccatcacgctgaaggtaggggagtgagttcggtagctcacccagcctgagaactgtcagggagctgcagtggggaatcactgcccacaagatcagcgagggaggaaagcagacgcttgggaagactccatccagggccctgtgtccccaagccgtgcactgcaccggctgcaaagcccaggctgccagggaaaacacacacaggccaactcccaggaggcgcccagagatgcttcctacctgaagaaaaggcggagggagcgcatgtggcccaggtccacgcggaacacgccgcaaatctgctccagggcgcacacccgctgcggctcgtcccagcgtggggtctgcaggaggccgttgctgtccgggaaccgcaggccggcgtcggagctggacggggggctggtggaacaggttatgtgatgatcgccacacttctccctgcccacactacccagagggggacgggggtcatgggggagtcatttaaacctacgcaccaagcttaaacacacatacaggcacggctgaatatgccctgtaaacacctgtgaataaatgaatgtatgaaccccactgcacagttctacttccacttggatgggaaagcattttcatgatcaaattccattccacttcaatagaggcagtaagtcatcatcgtcctgacagccaaggtcacactgactggggttcctcgctgtgtgaccttggccaagccaccaagcctctctcagccttcgttttcccatggataaagaaggcaggagaataacaaggctgggtttccctacagcgtggggctgggctttactaaaactggttgttttgggatgattttagatagcatggggcttccgcgtggtttaaaccagctcactgtattcctgaaaagtactggttcagtttatgcttttggttaggaaacatttgggttctcagtactattaataacatcatcagcatttattaaaacactgactatgggcctggccctgagctaatgcttctcaggtgcttttattgcaattaatcttcacaaaaatcctctgaaatgaatagtggtattaccccattgtaaagaagaggcaactggggcccagagaggttaagtaatttgcccaaggtcacacagctggcaagtggtagagctgagattagaacccaagctttgtggcccatgttctcaccagcatactgtgcagctgtctgcagttcagcagtacaaccccatttattctgttattttttatgagtttgttacattccaaattgcaaaatatcttattatatggattcagccacctcacaggttaaatcttgtctcttgagattttttctttttttcttttttcttttttttttctttttttgagacggagtctcgctctgtcacccaggctggagtgcagtgtgcgatctcggctcactgccacttctgccttccgggttcaagcgattctcctgcctcagcctcctgagtagctgagattacagacgtccaccaccatgaccagctaattctatatatttagtagagacgaggtttcaccatgttgaccaggctagtcttgacctcctgacctcaggtgatccacccgcctcagcctccaaaagtgttgggattacaggcgtgagccatcgcgcctgacactctcttgagatttaatgtctagcaaatgtctgctaaaataaaaccggagtacaggcaagactcagctctggaccccaactgcagcaccccacagagactcagccgcattcaccgcacctgccttcccgtttgagctcagaacataaactattagaggcaatcaatccagaggcacttcctcctccaagaagcaccaggtctaagtaaataaagctcctttggagggttccagcacaatccctccccactgggaacttcacacagagaaacctgactggcctttctagagccctctactgcgtcaggcatagccctgggcctggtgagtggcaggtggcctttcttccccacctgcctaaggaagtcagccgaacaggtcctcccactgctggggcccctgggctctcaaggaaactgagtcaggtaaaactagatcagagatgggcatgtggggccatcacctgaactgccgtggctgcgccgcggacgggcccagaagaccgagggctcctgacatcttcccaagtggaccctgcgggagctgcgcttcagaatcgttgctcacaacacagggcaggtctcgagtctgaggccccaccgcacccatgggtgcccccttctgtcatctgctcattgaaccgcggggctgctgtgactgtgagagctgctgccccgtgtgctgcctgctggcccggcccacccagtggggccatcagagggtggtatcctttcccgcctcctcccccagccttcttaccacacccaacagcagaatcccccaaacctgcttgttcctcccagcacactgtggcccactcaccctacagggcaggccaaggtttccagaaaccagacagaacacagagactcgctttggcagtcacggatggagggccccctccctgctgccgtggccacagaagactggtcccctggagggccggagccgatttcaaaccaggcaagagtccaggacacaggggccaccacacacctcccccagcaacgtgcctccaggcaggagttggcttaaaccctctcgcaaccccttaggggcaaattatttgcattaattaatggattgattcattaattcaagatactgtgcttgggacctacagctggggttccataagctcaaactagagcgaaggtgatggagacctcagttcgctttcattggggtacgtctggcaggtaccccaggccctgtgtggtcatggaggacgaggtctggtgcccctcgaggccggctgctgtggggtgggggttgcatcgtgtctcttcatcttcagctcccagccctggcttggcgcagaacacacagacatttaatactcatgcctgaagtgaaaatgtaaagtgtctgggaattttgaagtcacagaaaaaaatgtttaaagaaaataaactacagggaaaacgaaatatgtacagtgttttatttttgcttatctttctacacacgtaaagcaatttagttttaagaatattcatatatgctgcaaataatttagcttgttcataaaattatgtgatgcattggaactaaaaggatgggttttgcaggcgataactcccaagatgctattacattagaaagatctcacacataaaactagaagacgctaaactttaagaaatgtagcagttcttcatttctatcattttctgaagatcacccaaatgtaaaagcagtaatgaaaaaaagtcagcactatcactggaaaacaaacacaaacactgggttctccctccaccacagtaaactatgccatgtcagatacagagatagagatttaaaagggcctcaaattcttcacagctcatcttatcaaggatagcacctgtctctccacccctgaatctaggtgggccttttttgaccaatagaatgtggcaaacatggtgttaggtgagttctggggcctaggcagcccctcactcttcctcttggcacagtgcaggcaagacagacagacgagagctcatgagagagacacgcaactggcagtcagcaccagagccccgacacctgtcaatggaggccgttccagaccctccgcccacccaagcctcctggtggctgcagcgacctgagtgaactccagggagcccagcgcaacagcctgtcccagcccagcccaaaccaaaggtctgtgagcaaagaagcggttttttgtttgtttgtttgttttttaaagacaaggtctccctctatccccctggctgaagtgcggtggtgcaaacacaactcaccgcagcctcagcctccggggctcaagcgatcctccagcctcagtctcccaagtagctgggactacaggcactcaccaccacatttggctaatttttgtattttttatagagatggggttttgccatgttgcccaggctggtctcaaactcctgagctcaagcgatctgtctgccttggcctcccaaagtgctgggactacaggcgtgagccaccacgctgggcccggtggtcgctttaagttgctgagtttgagggcggtttgtttcacagcaacggatcactgacacacgcaggacaagccagctctcagaaaaagcttgaaggggaggaagaaaccttcaaacatattgagctgtggttctcaaggttaccagggccagattttagcattatttaaaatacctaaactgctaaatttcctcttgcttttcttcatcctgagccttttaagtttgctgaaaaaagtcgatgagaacccagctgtaggtcccaagcacagtgtcctgaattaatgaatcaatccattaattaatgcaaataatttgcccctaaggggttgtgagagggtttaagccaacttctgcctggaggcacgttgctgggggaggtgtgcggtggctcctgggtccaggactcttgcctagatagaaactggcactggccctccaggggaccagtcttctgtggccacagcagcagggagggggccctccacccgtgactgccaaagcgagtctctgtgttctgtctggtttctggaaaccttgccctgccctgtagggtgggtgggacacagtatgctgggagggatgtgtaggtattggaggagtgagcagggcgtgttcggtgtgctgggttgggagaggaggctgtgatgggagaggaggctggaaagaatgacaccctttggtggtcccccataattgccaaaacctggaagccaccaagatgtcctttggtagtgaatggataaataagtttaaataactgtggtgcagccagacaagggaatatattactcatcattaaaaagaaatgagctgtcgagctgtggaacaacacggagggaacttcagtgcgtcttacgaaggggtttactaagtgaagggacccactgtgacaaggctgcaccctgtgggattccaattctaggacactctggaaaaggcaaaaccatggagacagtgacaagaccagtggttgccaggagctggcggggaggtaggaaggtgaagcacggagaacttttagggcagtgacacaccggcatgacaccagagtggtcacggtgacaggtgtctttatacatttgtccagacccataggatgtacaagaccgagtgtgaatgccgacaaactatagactctgggtgacaatgacgtgtgggctcatgagtcgtaacatgtgtcccactctggtgggggaggctgtgcgtgtggtgggggagggggtggatgagaattctctgtacccttcactcagttttgctgtgaaactaaaacagcttcaaaaaataacatctattaaaaaaaaaaaaccaacaaaacaaatgaatagccaaagaaactgggacacatatatgataaagattaacatctttagtatgtaaaaaagtatgtaaattaaaaagaaaaatataaatgcccaacagaaaactggcaaaaggaaaataaaaaaatttagtagagaataaatacaaataatgaataaaatttccaggcccagggtaatgaaataaatggaaatagaaacgggataacatggtggggggatggtttatgaaattggcatcaattaacaaattataaaatctagtgtggtaaaggatttggggaaacagacattctcattcagctcagggggagaaagaatataaactgaccaattttttttttttttttttgagatggagttttttgctcttgttgcccaggctgaaatgcaatggcaagatctcggctcactgcaacctccacctcccgggttcaagcgattctcctgcctcagcctcccgagtagctgggattacaggcgcctgccaccatgcctggctaatttttgtatttttagtagagatggggtttcgccatgttggccagtctcgtctggaactcctgacctcgtgatccgcctgcctcagtctcccaaagtgctgggatcacaggcgtgagccaccgcgcccagccctgaccaaatatttctgaatggcaatttggaaacaagatgccaaaggcttaaaaatgtttatacattttgacttttcacttccattcctaggaatgaatcctaaggacatagccagaggtgcccacaataaaggcatacatgcacagatgcagaaaagcattcgacaaaaatccaatgctcatttatgacaaacctgtctacaaactaggaatggaagagaagctcctcaagctgataaaggcacccacagatattccaccgttagcgtcatactgaatggtaaaagatggaattgttttcccccaagagcaggaacaaggtaagaatgcctctgctcccaccacttctagtccatgctctcacagaggccctggcctctgcatcaggcaagaaaaggaaataaaaggcataaagactggaaaagaaggaacagaactgcccctattttcagttgatacaactgttcatctgaaaaacctcatggaatttataaaacaatctttagaactaataactggatttcataaaactgcaggataaaaggttaatagagaaaaattaattgtattcttaaacagtaacaatgcacaattggaacatgaaataaataaaacattaaatttatagtagcaaaaaaatccccacataaaatacttcggaataagcctgacaaaagacattcaagaacgtcatactgaaaaacacaaaaattgctgagataagtcaaataggatcttaagaaatgcagaaatgcaccatgtccatagaataaaaccgtcaacttggttaagatgacaatcttgccaaactgatctacagattcaacacaagcccaatcaaaattccaacaggaatttttagtgaaaattgataagttgaccctaaaatttggagctagtataaccagagcgactataaaaaagaagaacaaagttggaggatgcatctgactttgagacctacatagctatcatcaagaaagtttggtattggtgaaaagataactatggtgaaataggcaaataatcaatggaacataacagagtccaaaaatatcaattgattatttacaaaagtgcaaagacaattcagtggagaaaggatggcttttcaataaacgatactggatcaacaggatatctgcatgaaaaaaattaacatcaactcttttctcccatcactcccccaaattaactcaaaacggatcacggacctagatgtgaaaccttaactaggaaacttccagaagaatccgtaagagaaaacctgtgtaaccttagaataggcccaggtttcttagatagaacacaaaaaatacaaactgtaaaagaaataataaattggaaaattaaagacttttttttttcatcaaaatactccattaaaggaaacaaaaatgcaagtcacagactgggagaaaatattcacaaaacatatagtcaacaaaaaacttgtatccagagtatgtataagaaactgttaaaatgaaatactattgttacacaaaggtttcttagaccagacaccaacatatgaccataagtgaaaaaaaaaattaatcttcattaaaatgaaaaccttctactctttaagagatattgttaagaaaataaaaagataagccacagactgggaaaaagatatttgccaaatgcttatatgataaagggcttatcatataagtcagtaatatgctttaaatcatcattctatacagaatatagaaaaggtcctcaaaacagtaataagaaaacacaatccaaacatgggcaaaagatttgaaaagacatttcaccaaagaggatattcagatggccaagaagcctatgaaaaggtgctcgacagcattcattattagagaaatgcaaatagaaagaaacctcaatgcaatctaaaggaacatgatgtgatccactacacatctattggaatgactaaaaaacaaatgaatgaggccacgagcaaggcagttcaagcttgtaatcccagcattttgggaagctgaggcgggtgggtcacctgagctcaggagttcaagactagcctgggcaacatggcgaaatcccgtttctgctaaaaatacaaaaaattagtaggcatcgcagtgcacctctgttatcccagctactccagaggctgaggcaggagaatcacttgaaccctggaggcgaggttgcagtgagccaacatcatgccactgcacttcagcccgagcgacagagtgagactctgtctcaaaaaaacccaaaaaacaaaaacccaaaaaaaaaaaaaaaaaaaaaaaaaaaaaacgaaggaatgaaactgacactgtgagtgctggccaggaggcgagcaacagaactctcctacaatgtgacgggaagtcaaatgacagaaccactctggagaactgtttggcagtgtcttataaagtcacacacacccctaccatatgactcagcaatgccccctaggtatttacccaaaatacatggaaaatgttcacacgaaatctgtgtgtgaatgtttatagcagttttattcatcattgcagaaaacaggaaatgacacaaacgtctttcagctggtgaatggctaaacaaacaatggtacatcttaacaagggaatacatacgcctcagcaataaaaaggagcaaactgctgatatgcatgacgatatggaagcatctcagttgtattatgttaagtgaaagaagccagacacaaaaggctacatgagaagatactcagcatcctctgtagtcaggaaaatgcaaattaaaaccacaatgagatactcctactcacctattagaatggctacagtggacaagactgatcatagcaagtgttgctgaggacatggaggaactggaactctcacggactgctggtgggaatgcaacacggcaaaccactttaggaaagcagttcagtaatttcttaaaaattaaacacatgcctgtttccagttattccattcccaagtatttaccaagagaaataaaaacatatgtccacgtgcaaagacttgcacataaatgtgtgtaacagctttatctaaaatagctaagaactggccaggcacagtggctcacgcctataatcccagcactttgggaggccgaggctggtggatcacctgaggtcaggagtttgagaccagtgtgaccaacatggtgaaacactgtatctaccaaaaatacaaaaaatcagccagacgtggtggcgggcgcctataatcccagctactcgggaggctcaggcaggagacttgcttgaaccctggaggcagaggttgcagtgagccaagatcacgagactgcgctccagcctaggcaagaagagcaaaactccatctcaaaaaaataaaaataaaaataataaaataaaatagataagaactgaaaacaacccagggtttatcaacagccaatgcagtaatgaatcgtggtctgtacataccatggcatactactcagctgtaacacgcagtagcatggacgcatgacaaaattattatgctgattgaaagaagcaggacaaaaaacaagcacatactgcatgatcccatttacataaaattctagaaaaggcaaacaaatctagagtgatgcaaagcagatgcaacttttttcctttttccaattattttattgtgttaaaaaatacttatcatcaaatttaccatctcaacctattttttttttttttttttttttttttttgagacagagtcatctcactctgttggccaggctacagtgcagtggcaagatcttggctcactgcaacctccacctcccggactcaagcaattctcctgcctcagcctcccaagtatctgggattacaggtacccgccaccacgcctggctaatttttgtatttttagtagagatggggtttcaccatgttggccagctggcctcaaactcctgacctcaggtgatccgcccaccttgcctcccaaagtgctgggattacaggtgtgacccaccacacccggccccatctcaaccatttttaaatgtacagttcaggtattaaatatatttctaatattgtacaatgatcatcaccttccatttccagaactcttttcatcttgtaaaacaaaagctctatacctattaaacaatagcttccaggccaggcgcggtggctcatgcctgtaattccagcactttgggaggctgaggtgggcaggtcacttgaggtcaggagtttgtgaccagcctgaccaacatgatgaaatcccatctctactaaaaatacaaaaattaatggtggctcatgcctgtaaccccagcactttgggaggccgaggtgggcggatcacctgaggtcaggagttcgagaccagcctgaccaatatgatgaaaccccatctctactaaaaatacagaaattagccaggtgtggtggcatgagcctgtaatcccagctgagacaggagaatcgcttgaatccaggaggcagaggttgcagtgagccgagatcgcgccattgcactccagcctgggcaacaagagcaaaactccatctcaaaaaaaaaaaaaaattagccaggtgtggtggtgggcgcctataatcccagctacttgggggagactgaggcaggagaagtgcttgaacccaggagttggaggttgctgtcagccgagattgtgccactgcactgccgcctgggtgacagagtgggactccatctcaaaaaaaaaaagcaaaaaaaaaagcccgataacttcccattcccccctcacactccaagcaacatcaactgtctgtctcaatgaatctgactactcctagcacctaatctcagtgaaattatacagtattgtctttttgtgactggcttatgtcacttagcacaatgtcctccaggttcatccatgccgtagcgtgggtcagaatttccttcccttttatggctgaataatattccattgtacggatggaccgcgttttgtttatcttttcatccaccaattgacgggttgctctatgttcttatgtgaataatgctgtgaagccatggtgtccagatatctctgtgtctctgctttcaattcttttgggtatatacccagaaatggaattgctggatgatatggtcattctatttttaattttttgaggaactgccatactgttttccacagcagctgtaccaccttacattcccgccagcaatgcatagggatttcaatccctccacatcctcaccgacacttgttagtttttattttttgatagtagccatccttatgggtgggaggtcgtatttcattggagttttgattttgcatttccccgatgattaatgatattgagtaccttcatgtgcttatcgggcattcgtgtctcttctttggagacacgtcttttcaaatcctttgaccatttttgaattgggttgtttggggtttgtttttgtttgtttggttgtttggttgttttttgtgtgtgtctgtttgtttgttttggagacagagtcttgctctgtcgtccaggctggagtacagtggcatgatcttggctgacagcaacctctgttttccaggttcaagctattctcctgcctcagcctcccaagtagctgggattacagacatgcaccaccacgcccagctaatttttgtatttttggtagagacggggtttcaccatgttggccaggctgatctcgaactcctgacctcaggtgatttcgcctgcctcagcctcccaaagtgctgggttacaggcgtgagccaccatatccggccagttgttttttgttgttgttgagttttaggagttctctataaatcctggacaattattccttattaaacatacatgatctgcaaatattttcccgcattctgtgagtgatctttatactctgctgatagtatattttgatgcgcacatttttaaatttttcatgaggtccagtttattttttttattgcctgtgctattggtgtcatagccaagaaatcattgccaaattgcagataagacattggggggacacgaagaaacttctgggggtgatggatctgttcattatcttgattgtgatgacggctccatgagtgtatattatgtccaaactgatcaaattgtgcactttaaacacgtgcagttgattgtacagttatacttcaataaacttgtaaaaaataccaccaatattcaactctcagtactattgctaaattttcaaccataggagaatatttgaatatattgtggcacattcatatgatacaacgccattaagcacttataaaatatttaataaaagtatgtgatgaccagagaaatcctcacactgttatgctgaatgaggaaagtaggttgcaaaactatataaaaatatactatcaatactgttttatatataatatatattgacaggtattttatacctatgcaagtgtagaagtagaaaataatactaaaactataatgtgatcatatctagatggcatgtctataatatactttcaccgcattaaaagaattttctaaaaggcataatgtatcattctgataatcagaaataataagctaattttctgtattaatttttttttgaggcggagtcttgctctgtcgcccaggctagagtacagtggcgtgatcttggtggctcactgcagcctccgcctcccaggttcaagcgattctcctgcctcagcctcccaagtagctgggattacagacatgtgccaccacgcccggctaatttttttgaatttttagtagagacagggtttcaccatgttggccaggctggtctttaactcctgacctcaaatgatccgcctgcctcggcctcccaaagtgctgggattacaggtgtgagccaccgcgcctggcctgtactaatttttaaaaaaagaagcctgtgtttcttttaatattataaaacaaaaaaataataatttagaaaagaaaaaggtgaggcaaaataaccaattatcgtcatggctaccatttattggagcttcctgtgtgccaggagctctcctaattgctttgaagacttccttacataaaccttgtgggtgagacagcactccattttatagctaaggagaccgaggccaggaatcatgtccccgggtttcagaatggcccacagcagggcaggatggacagctaggcgtgacctatgggaagctcacattcctgactcttttggcatatgccttccagagacagcagtcacatcaactggaaaagaagacaacactctaaaaacaacatctatgaaagaatgcctctgaaactgtgtccacttctccccttcacccctgctcctggctcagaaactatcaacagtcagctttgtctgccagtcaagctcccatccatagatgggcactgagcccgccccacacattggcctggtcgcctctttccttgttttccctggcatgagtttcctagggctgctgcaggaaacaccacagctgcatggcttaaagcaacacgaatgtgctctctcacacttctggatgacagaagcctgaagccaaggtgccagcaggccacactccctctgaaagtctaggagactcctcctttgagtccccccagcttcgggcagttcctggcaatctgtggccttccgtggcttgcagctgtatcactccagtctctgctccatcatcacgtggccttcttccctctgtatatgggtctactgtgtctctgttttctctacttagaaggacaccactcactggattagagaccaccctaatccagaatggcctcatcttaactaattgcaaagaccctatttccaagtaagattgcaatctgaggttccaggtggacatgaatttgagggaacactcttcaatccagtataccccttaccatgcccccactagatcacaggcaaacatgacagctcacttcctttccataccccaggacctcctctccccaggatttgcttatgtgggtccctctctctggtcggcctgctctgcctctctctctcttctaattcttcccactctccaaggccccgctcaaacactacttcctccaggttgcttcccttcaatccccagggaagccactaagcaaagtgtctgaaacatacagcaggtccaacatatgctaatttccctttatcccttggaaaatccttagaaacttatcagtcttttttttcatgtgttttgcttttgactttgtataaaagtcatttgttgatacaaaaaccagacgaagacattacaagaatataaaactttagatccatttgaatagacccaaaaatcttcaacaaaatactagcaagctgaacccaacaacatataagaagagttgtacaccatgaccaagtgcggtttatctcaggaatgcatgactggttcaacatatgaaaatagatggatgtaagacactagattagtaaaagaaaagacaggaaacacaagatcatctcaacagatgcagaaaaacatttgacaaatccaacagcatttcaaaataaaaacattcactaaactaaaaacggaaaggaacttcctcaatctaataaatgttatctatgaaaaaccaacaactataaaaaaaaccccacaaatttaagtgtgaaagactaaaagttttcccccatataactgggacaagacaaagatattcactctcaccacttctagtcaaccttgtgctggaaggtctacctgggaaattaggcaagataaagaaataaaatgcaaaaagattttaaaaataaaatctttaaaagaaataaaattttaaaaaggaaaaggaagaagattggaaaaaaaggagtaaaactatctctattaacagatgacatgatctagcatatagaatatcattaggaatctacacacatacacacacagaaaacccactgaaaccaataaatgaagtcagtaagtttgcattatataagatcaatgtctaaaaattaattgtatttctatacactggcaatgaacgacacaaaaataaaattaataaaacaattctcttcacaatacacgtacacacacaagtacaagacttgtgtacttaagactataaaagttgaaacaaattaaagacctaaataatcagaaaggcatcccacgttcatggattggaagacttaatattgttatgatggcaatactctccaaattgatacacagattcaacacagttcctatcaaaatcccagctaccgtttttgcagatattgacaggttgaccctaaaattcatacggaaatacagaggacccagaatagccaaaacaacattgaaaaattaggactcacacttcctaatttcaaaacttaactacaaagctacggtaatcaatatggtgtgataatggcataaggatagacatattgatcaatggaatagaattgagagtccagaaataaatccacaagtttatggtcaattgtttccaacaagcttggtaaaacaattcaattgataaaagaataatctttaaaaaatttttttgagacagggtctcactctgtcactcaggctacagtgcagtggcgagatctcggctcactgcaacctccgcctcctgagttcaagggatcctcatgcctcagccacctgagtagctgggattacaggcgtgcgccaccatacccagttaatttttgtattttttggtagagacaggatttcaccatgttggccaggctggtctcaaactcctgagctcaagtgatctgcctgcttcagcctcccaaagggattataggcatgctgggattcgaggcatgagccgctgcacccaaccgggtgaaagaatagtcttttcagcaaatggcacagagacaactggatagccacatacaaagaatgaagtcagaccataacctcacactgtctacaacaattaacttaaaatggatcaaagacttaagtgtaagagctagaactataaatctcttagaagaaaacatagatactttgatatgacaccaaaaagacaatcaaccaaagaaaaaaatagataaatctgatttcataaaaatttaaaactcaacactatcaagagagtgaggccgggcacggtggctcacgcctgtaatcccagcactttgggaggccgaggcaggtggatcacgaggtcaggagattaagaccatcctggctaacatagtgaaatcttgtctctactaaaaatacaaaaaattagccgggcattgtggcgggcgcctgtagtcccagctaatcgggaggctgaggcaggagaatggcaggaacctgggaggtggagcttgcagtgagctgagatcgcaccactgcactccacagagccagatgccgtctcaaaaaaaaaaaaaaaaaaaaaaaaagagtgaaaatacaactcatagaatgggaggaaaatagttgcaaatcatatatctgacaagggactagtacccaaatattttttaaaaacacttaagatgtaagaataaaaagacaaatgactcaatttaaaaatgggcaaataatttaaatagacatatctccaatgaagatataaatggccaataagcacatgaaaaattctccacatcattattccctggagaaatgcaaatcaaggccgagcgtggtggctcacgcctgtaatcccagtactttgggaggccaaggtgggcaggtcacctgaggtcaggagttcgagaccagcctggccaacatggtgaaaccccatctctctaaaaatacaaaaattagccgggtgtggtggtgcacacctataatcccagctactcgggaggctgaggcaggagaatcgcttgaacctaggaagtggaggttgcagtgagccaacactgcaccactgcactactgcctgggcaacagagtgagactccatctcaaaacaaacaaacaaaaagaaatacaagtcaaaaacaacgttgagataccactccacacccactgggatggctataataaaaaaatgggaaataataagtgttggtgaggaggtcctagagaaatcggaaccctcattccatggtgatgggaatataaaatggagcagccaattgtggaaaacagtttggtaggtcctcaaaaattaaacacagtgttaacatttgaccaagtaattccactcgtaggtagatatcctagataatagaaaatagggccgggcacggtggctcatgcctgtaatcccagcactttgggaggccaaggcaggtggatcacttgaggtcaggagttcgagaccagcctgcccaatatggtgaaaccccatctctactaaaaatacaaaaattagccaggtgtggtggtgcatgcctgtaatcccagctacttgggaggccgaggcaggagaatcgcttgaacccgggaggcggaggttgcagtgagccgagatcacgccattgcactgcagcctaggcaacagaacgagactccatctcaaagaaaagaaaagaaaagaaaatagatgtctatataaaaacatgtacacacatgttcatagtagcattattcatcatatccaaaaagagaaaaatgcccatcaactgatgaccagataaggaaatcgtggcatccatacaatggaatactgttcagctataaataggaatgaagtaccggcctgttacaacacggatgaatcctgaaaacacgatgctaagcgaaagaagccagtcacaaaaggccacgtgttctatgatttcatttatatgaaatatccagaataggtaaatccatagagacagacagcaggttagtggctgccagggctggggaaggaagggctgggctgtgactgctagagtatgaggtttctttttggggggatgaaaatgttctggaatcaggttgtgattacacagcttcatgaatgtactaactgccactgcattgtacactttaaaagggtgacttttatgctatgtgaataaaaggtcactatgcacccgctctctcccgtctgatttatcttgtacatctcccaccaaagggtcttgtacaaagcatggcctcagaaaatatttgttctgcaataaaaagttctgggtgtcccccaccctctcaacctgcagacaacgagacaaggttgccacctgtgtagagcttcattgtggtgggaagtcaggcagcaaacggtaaacgggtcatggggtgctctaagggaatgagcacagggtgggaggtggaggggctgggcacggccactctagagaggtggacctgggggtcctcagtgaagcctgcagaaaggtgaagagctagcagagagcccaggggaaatgcatgcctgaaataagctaagcacatcagagaaagcaccagtccttgtacgagtcccagtgcaaaaacagcgccaccctggaaacggagagtcagcccggtgcaaaaacagcgccaccctctggaaacagagatgcagtttgctcttgcattgttgagttttacgttcctcccagtgtgggaatggaagtgatctcatattgtaaataattttacattaatatacactccctgtatttttattttttatttttttttgagatggagtctgtctccattgcccaggctggagtgcagtggcgctatctcggctcactgcaacctccacctctcgggttcaaggcattctcctgcctcagcctcctgagtagctgggattacaggcgtgcaccaccaagcccggctaatttgtgtatttttagtagagatggggtttcaccatgttggccaggctggtctcaaactcctggcctcaggtgatccacccacttcggcctcccaaagtgctggcattacaggtgtgaggcaccgcacccggcccacactcccagtattttttaagttgcttaacatttgcaagtggtaaataaattcacgttgtggttaaaaattttaaaaagactgaagtgtgcagaatcggcattggaagcctgtcccccaggtcatcctggtctggaagccctgtcccccaggtcatcctggtcagcagttgagtgactcttcttccaaagttcgttctgcaggtttacacacacttgaaggtatcttcccatgttgctggtagacaccattttggaataatggctcaggggcaattagaaaagaagagtctttaacgtattcttcaacttgactcataaaagtagagtcaatcactcttctctacaacagtcaacttctctcaaggaagacctgaggaagctggtgcccgacccaccaggagacatggacctcataggaggtgagctgaggatgtggataatttggacaccacttggactgtgagctgctgggaggtgtcagacaggagcatcccacggggtagggatgggggctctggaaggcttcctctcggagcaggtggcatgggggctggctgtgggggtctttgtggggaagaaagagcctgagtgggtgcagggacaaggaaggtctgcggaggacaggtcggagtgctctgaaaacggccctggcattgatttttaaaaagggtcgctcaaaagaactgaaagcagggactcgaacaggtatgtgtaccccgtgttcacagcagcatcattcatgatggccagaggctgaagcagcccagtgtccatcgatgggtgaatggagaaagaaagtgttgtccctgcatgcaatggcaggttatttagctataaaaaggaaggaaattctttttttttcttccccctgagagggagtcttgctttgtcacccaggctggagtgcagtggctcaatcttggctcactgcaacctccgcctcccggattcaagcgattctcctgcttcagcctcctgagtagctgggatcacaggcgtgtactaccacacctggctaatttttgtatttttagtagagacagggtttcaccatgttggccacgctggtctcgaactcctgacctcgtggtccacccgccttggcctcccaaaaaaaaagtgctgggattgcaggtgtgagccactgcgccctgctaaaaaggaaggagattctgacacaggctacagcatgaatgacacctgacgttacgctaagtgaaagacgccagacacagaaggtcaaaccctgcatgattccactcctatcaggtccccagagcagtcaatctcagaggcagaaagtagaatagaggctgccaggggcttgggggagaggagatggggagttgtttaacgggaacagagtttcggttgggaagatgaaaaagttctggaggtggagagtatggtgatggctgcataacaatgtgaatatacccactgccactcaactgtgcacttacaaatgattaaggctgggtgcggtggctcacacctgtaattctagtactttggaaggccgaggcaggagtggatcgcctgagcttaggagttcgggaccagcctgggtaacatgatgaaaccccgtctctactaaaatacaaaaaattagccaggcatggtggtgcctacctgtaatcccagctgctcaggaggctgaagcgggagaatcacttgaacctgggaggcagaggttgcagtgagccgagatcgtcctgctacattccagcctgggcaacagagcgagacttcgtctcaaaacacaaaaatggtaaattttatgttatagtggtacctccttatccaaggggaatacaacccaatacccccgttggtgcctgaaaccttggatagtgccaaaacctataaatactatgttttccctatacatacacacctatgataaagtttaatctacaaattaggcacagtaagagatgaacaacaataataataaaatagaagtggctgggcgcggtggctcatgcctgtaatcccagcactttgggaggctgagacgggtaggtcacttgagcccaggagttcaaaaccagcctgggtaacacagttagaccccgtctttataaaaaaaattaaaacaaagtctgggcgcagtggcttacgcctgtaatcccagcactttggaaggccaaggcgggcggatcacaaggtcaggagatcaagaccatcctgtctaacatggtgaaaccccgtttctactaaaaatacaaaaaaaatagccaggtgtggcggcgggcgcctgtagtcccagctactcaggaggctgaggcagaagaatggcatgaaccccagaggcggagcttgcagtgagccaagatcacgccactgcactccagcccaggcgacagagcgagactctgtctcaaaaaaaaaaaagaaaaaaaaattacaacaaaaaattatccaggcatggtggtgcatgccatcatcccagctacttgggaggctacagtgagccatgatcacactactgcactccaccctgggcaacagagcaagaccctgtctcaaacaaaaacaaaaccaaaaccctcccccaaaacaatatactgtaataaaagttcattcttaccagaggtcgtagcaacctcagcacagaattctgttctttccttattcagttgagaacttccgccttctcgctaaaaggaagcgctttatggcttctctttggcatatccaaattgtcagcatcactgctctggtgctgtggggccattattcagtcaaataaaggtgacttgaacacaagcactgagatcctagggcagccgatctgatcacccagacagctggcgggatggagggggagggtaggagacttcattactctaccagaatggcatgcaatttaaagctcatgaattgtttatttctggaattttccatttaattttttttttctcttttttgagacggagtctcatctgttgcccaggctggagtgcagtggtgcaatctcggttcactgcaacttccgcctcccgggttcaagcgattctcctgcctcagcctcccaagtagctgggattacagacatacaccaccacgcctggctaatttttgtatttttagagagacagggtttccccatgctgcccaggctggtctcgaactcctgacctcaggtgatccacctgccttggcctccccaagtgctggaattacaggtgtgagccactgtgcccagccccatttaatacttttggattatggttggccgagggtaactgaaactgcaaaaagcaaagctgcagtgaggggggactatatgtattttattgcaactaaaaaccaaaaaacaggtgaaccatagagtttcttggcttcctccaccctaaagcacattcccttatcttccctggctctcccaggctcttctcaggcgtggcacccacacagtagggctagctaaccctggggacccagcaaaggctgcaccaactcacaggtggggctggtaggaggctgggttcacgctcaggtttatcttatgatgctgaggagtttgtggaataggttcaaaaacgttgaaagagggagaagcctgggcgccttgctttcagagtgactttgtggctacctccctgtccgattcctgatttggcctcggtttttgcctttgacctggggttggggccacccccgcagccactgcgccctctataggtaagaaggcccaaggaagaagccctctgctccgtcacctcctcgccatgccgtccccactgccagtgggcgcaacgttacttgcaaggccacaaacacccggaacaatccgccaggccgcgtcactcctcaccctccagcagggctttggatttttggacagcgagttctgtttcattttgttttgtttttccctttgcatttggtgaactccgtgtcaggaaagctagtctttgggattcaaggaagaacaaaacaaacccgatctcctgtaatctacctggattggaacgcccagctttgtacagcctgagctctggccgactggaatttctgccaggtcctattcacacccttggccccagctggctgtgaggtttcctgggaacccttgcctcctacatggcctacttaaaaggctgctgagagccagccaggtgttctttaagcccctgtgaagattccttgatcagttacacaaaaagcttgctcaaaagaatgggaccgggagcaaccgcaatgccctctggagacccagctcctgatttcaaaggatcaacgagtgacagagggttggggactgggggggtcgtgcatgaagacagccaccgcccacaacaggtccaccctgaagtgaaaagacaaatatcatttttcctccagtttgcaaccaactgtgcacagcttcgggacccccagccagcccaaacctgtcgctggctgcccactaacgctcccagcagcccttagtacaatacaaattcaggcaatgcctgcgtctgcccacacctgcagagcatgagccccactttggaatgacggggtctgtgcagagaccgggcagagctctgggcttcaggatggcagcagcagctccggcaggcggctctccaggccacgagatgggcacagaccttcctgcaccctcacagcttctgcggctccccaggcaacggagccagtcagggcatggggacgccaggcagcagtgtcagacttggccattgccaagttctctcttgtccccgccaggcagaacaggtgcacatccaggtcaacctgtgacctcggccttactaacccttgtctaggcaaacctgggagcgagatggaatcaaataagaaccaacctatactgggcagtgattactctaaaagcttatgcaagagccctgctcctctgttggtaccctacatgtcgatgccgagactgaggctcagagaggtctggtcattgctcacaccggcccctgcactgtcccaggctgtctctcttgcagcaagggaaaatggctctttagcctctgttatgttttaaccataaggcattttctcacgcagggctttccaatgttggcccacagacaagaagcccactggacatttgggaagaggagttttagagagaagaggatggaggaaggctagagtcacggtattgtgtgtgcacgtgtgtgtgtttacacgcctgaaacgaatgactgcgtcggtcacatgtgcggtgtgcccacatccttcccaacaaagatgagctcaaaagcgtgagggaaacacaccgtgcaaagaccagcttaggggattctggtgaatgtccagagatccaaacagcaagacccccgccgctcctgactcagcagggatgctggatgcaaactggccctgatacactgggccctggggtcttctccacgtcattatcctggagggtttaagtcccccgaggcaggagccaaagggaacagcaagcttgagatttttctgaagcctcttccgttgacagtgcctttccattcatctgaaacaaactctgaaggactcctctctatggaatcggtccccagaggtggaggctgctgctccatcccagcccctctcatcccatcctctcctgcttcacgcagcccaggtgaggcctgccctgcagaaggctacagggaacacgggatggggcagtttctacctgcctgctgagctgctctggtgacttaaaacaaaagtgtcaggagcctctggcaggaggaagggaggaataaaatccagcattcaacccaagcatctctgttgcccatgaattcatccttttcagtgatccgtccaccagaatatcctactttgcctgggtcatttcacgccttccccaacgaggcgaaccccagcccaacgtccaaagctttcctgaagccccactgcctccaccaccctcagtaagcgaagagaagggaagatgcatggagccccgccccatcccagagacggcccggtgcacagggacgtgcaggtcacacagattacaaggctgaggaggggatgggatgggaaggggtccgtgtggagcagcagcctccacctccgggtctctgactccaacgaggcagagaccaccttccctgacgcctcatccctccacctggccccttcccagcatctgcaacccactggtgtgtcttggtcccccaggcaagggtgatgtctcagccatctctgcaacccttgccccacagggcctggcacgcagcaggatgggggtgacggaggagagagagctctccgcaccttccttcccccacctgtgagacggcgatgagttggctggacgctacgatctctaggaaccccattaggctctaaaatcctggcagtttctaaaatgcacagtaagctaactgttcccagcaaaactgaagcacgtctggcataattagcatcacacacacatgtgcacacggcggtactggactcatccagccgagaggctggactctgccagcttcccgctgaccacagaggcagccagacccagctctggagtctgctcgcagagcccagccggctgtgcacgggagggcgattgatgcggctgccagttcgaagaggcagagcaataaagcctcggcgactgcggtgccttctgctgccggggtgggacccctaagcttttcagaggcctggatgctgaggggggcccacgggaagctggctctattaggctcaagctgccatttctgacataagtggcaatgttaagtgatgggcgcacagccggccggattctgccatcccaggcctagaacctgccccatggtcacggtcgagctcgggagcgccgacatcccgcatgcaccgagacagcctggcttttccagccagagggactgggagcagcaaggccggaaaatacagggccaagcggggcggggatgaatcgcagctcctcgcggcatgggcggcacactcccagagccagagctgctgggaactgggaaggcagggtctccgctccggcgattaactctgccgatctgcaacatcacggctaattagggaaggtgtaaatcactgggaggaagcgggcaggcacatccttcaggttgattaccagcacggtttaggaaaagataaccaggcccggcctttcttctgttcctttgccagccgtgggggcggggtgggggccgtggcgggcgggcaacaatccgcggcaggtaggaggagagaatgtaccaggcctttgagtgctgtttctgttttaattttttcttagtcatatggagtgaccttgtggatttcccagggaaattaagaaaaattccactgaacagatctcacagctgttacgagtttctgagcttccgtgggtcccgtgcatttacgactgtgacgacttagactcaggacgtgcacgtgatgccgtactgggctttttccattcagcgtgattacacggtgttattcattaagggctggagactctgatggcaggaatcatttgtttttctttttcccttaaggcatttgcaaatatgcttggaggcaaagggacgctgggtacatctaataaataaagcaaaataattaatagctcaagcagtctagagaccactcccagttgctcctgaaccaggcttttgagagccaatcgttctgttttcattccctctcgacttcgtccttgaaatacacattactgggaagaaaacagccaagagatttttctgaacccaaaaagaatgtttattttttttcccctagattttataggagcttaacgtgggcaaaccaatgagatgattctaaaccaaagcgccctcgtgggctccacgctctcagcctgtccatcagcagcacacctgggagattctgcccaacctagggaaaggaggagccataggagctgggcagggaaggccagagcacacacgctccggggacgcacacccacgcctagagcacacacgctccggggatgcacacccacgcccagagcacacgcgctccggggacgcacacccacgcccagagcacacacgctccagggatgcacacccacgccctggaccccagcagagggatcaagggctcaggcatccccagtgccgccaatcacgtggccctctcgaggtgaagctgcgacactgtgtggaaacccaggggagatgggagaggcctgaagcgggaggcgggaggaccgcatagctgcaaatgcatctgggcgtgaagacgtccctgtgtcatctctgcaggaccaaacagtcaattagtatccaaatacttttaggggacagaaagacgctcacggttcctgtcgcaggtccaggttattcggtgccataaaaaggcacacgtcgaccttcactgtttcctgcaaacacagctgggacatcagcccggaaaggaatgtaacctgtcaggccgcaaatcccacggttctcactaggagcaggaaaggaccctggtctcccttcacatccaccaaaagctcaccctgactagagaaccaagcagagactgaggccagagaataaccaagtagcaaggaggggaggggtcttcacagacagaggccttgctatgggtgggctctggcttccaggtggtgggctctgcgggccagagcttggggcgcaggaggccaaggtccaggtcccagacacatccattatggccaaacacaagaagccctcaggcctgcccaacacggctgtgggcaccggtgcctccccagaccctctgggcagcccatccttgcacctggaggagcagctcaccgtgccgtggagggtggccgcgaggttcatctgggcctccgagcctcccagcgcatcccactgctctgcagaaacagaataatcaccacccaggctggtggcttcccaacttttccgtgacgttcccctaggcaatttaaaaatggagtgaatactgataataatttgactaaatttaggtgttccccttaggcatctgattaaatttcatgaactctttttcaggcttgcagcccaaattccccttctctcttggcttcacggcacgggcttcttgaccaccatgtagggtcagcaaattccgcctaacaagccggagctttccttccttcccggaggaacaagacactaagaagaggttcccaggggaacatgcagtgggagtctgggccgctacgttgtggggtggtgtaaccagggtttgtccagaaaaagacacagaacccgcaggccctggaggaccctgaagatcaccaggcccagtctgttcctctccctaaccaggacactgtggtgcagacagtgtagggactggcgaagagacacagtgggtggcaggaacggggaacagaaagccagaaccttctagattctgagctgctgggctttgtgacatcccacatggcttggtcccgcctttcagccccccagggttcactcgaaccgcctccgcgcaccccaacagcagagacgtaacgtgcaggactgactggtgcttcccaaaaatcttctcggactcagtggcacacctgggactgcccgaatctgtgccctggtccccgttactgttcctgcaggctggaaggggagcctgtgagttgagccagagctgaccgggagctgctgggaccatggctaggggttgtgacgtgacctgggccccgggaggccctgagggaactggtgggtactctccagcaccccaaccccaaagggcaaacagtcatgataccaatcaccaacatcctttgataagaccttggctactcatttatattcatttaaattccatccacacacttgtcacagcaaagctgaattctgtatctagcccctcgtggcagcagtgacggaaggacagaacttgtttaggcatcgtttcctcgctccctccttaatctccactcggcttttcccatcccctgggcctagtttcaggggagccagcatcttccgcaccaatgcactgcttggcccggctcagaggatttgacgcaaaccaggactggggccctggccgacagaaaattcttagagcaaaatggctgttcaccagcggcgggtatgttcttagaccctccatctgcccgggccctgctgggagaaggcctcgggcctccacctccagcaatcctctaatacctcctcagagctttccggagagaagggaggaagccagggaagctctgggtgcccccgacaagtttaaccccttccttctttggcacacacttcacaaaagaagacaccaggtgaacaagcacgcagagacatattcaagatcgtcggtgataaagaaatgcgcatgaacatgatttttaagccatcctaccagcaacacttcgttttccaaagcggggaggccaaacctccaaagctgggagggctacagtcaaagaagcacctcccacaccggaggcaagggacgcgccaccctcggagcggctccctcggctcttctgtaatctcagcaagaacgtgctcactgcacataacgctgaacctgccacgggcacgaagcagacccacatccgtccctgcagcagcagcctcggcccaacctcaatcccactcctccaagggcgcgccagggaacagcaggacgcggccctccggggcttccctgtgcgcacacacacacgcacacacacacacatgcacatgtattaaagcaaaagtgagattgtgctgtcaacattgtgttacgcctggaatttttcagttactatatccagggccttagccctgtcggtatgcagggataagctgcacctctttttgagggccgcttccacgttttctctaaacattccttatagacaaagacttgggttgtttccattgtcgtttttctttgtgtggtttttttttctttttttttttttgagaccgagtctcactctatcacccaggctggagtgcagtgacacgatctcggctcaccacaacctctgcctcccagattcaagcaattctcctgcctcagcctcctgagtagctggaattacatgcgcccgccatcaagcccagctaattttgtatttttggtagagacggggtttcaccatgttggccaggctggtcttgaactcctgacctcgtgatccacccacctcagcctcccaaagtagggggattacaggcctgagccactgtgcccagcttcatttttctgtaaagtcaataatatcacattgaacttttgtgtgttcacgtctgcacacaatacaccgaacctgtgtgtgcacgtgtgtacaggtaccgtgcatctctttaaacattccctgaggcttggcgtggtggtggctcaggcctgtaatcccagcactttgggaggctgaggcaggtggatcacctgaggtcaggactttgagaccagcctggccaacatggggaaactccgcatctactaaaaaaaaaaatacaaaaattagccgggtgtaacggccggtgcctgtaatcccagctactcgggaggctgagacaggagaatgacttgaacccagggggcggagattgcagtgagccgagatcacgtcactgcactccagcctgggcgacagagcaagactctgtctcaaaacaaaacaaaaaaattccctgtaggcaagaattgggatgttactcattccacttttttgtaaaataaataatatgacattgaacttctttgtgcatgcatatgtgtgtacacgtaaatactgaacctgcgtcatccacgtttgtgcggaatccctgtgtgtgtgcacacgcatccaccccgagcctctgtgtgcagagctccaagcacagacgtgttcatcaaggacaagcgggaagccgggaacagctccatgtccatggaaggggcatgggcaagtgaaatgctacgtccctcaccaacaggccgctgtgcaggcgtgaaacccagtggcggttcagaagacgtggcagcgcgggaggggtttatggcagggcatgaattgagaatggcaagacagaccatgtaatctcagggactctcagctggccccaccccaggaaatgcagtcggtgtgtcttaggaggttgagtgcacattgcagggcccaggggcccctcggaggggctcctgtccctctgcaccaaaggtgtgcacagaagctgtcaaggtgacatcattcacagagaaaaacccaaactaaaccacatggtcatcaacaggagtgtggacaacctggggaacagccatggagacagtgtccccctattggagtgagcacccgcagcacctcaggcacggggagctgagccaccgacggctacaaagacggggacgctttcctagggctcaaagcaaggcagaatgttgagaagtgcacatgtgtgcaaagcctgctttaggagagcaaggaagtgccgcccacggcattccggaaggtggttccttctggagaccggggcacggaacgaccagactggggaggaaggagtggagcactggcctcctaggaagctctagttcagacacagggggcgctgggtcacggggttcatttatgattgtgtttcatggtttacatgctacaaatattctttggcatgtatcaaatatgacaaaatttaaaaaaaatttaaatttatttagagacagggtcatgctctgtcacccatgctggagtgcaggggtatgatctcggcttactgcagccttgatctcccaggcttaagggatcctccctcctcagcctccctgagtagctgggactacaggcaggcaccacagcacctgactatttattttgtattttttacagagatggcggggtgggggggcgggggtctcatttgttgcccaggctgaccttgaactcccagactcaagcccatcctcttgcctcagcctcccaagtagctgggaccacaggcatctgccagcacgcccagccaatttttcaatacttttttgtaaagatgggatctcacaatgttgcccaggcctgaagtgatgctcccacctcagtctcccaaagcactgggattacaggtgtgaaccactgtgcctggcctaaaatcaaaaaaaattttaaaccaagaaagtgaattttatatacagcctgcctgtctacaactctgtaaaataacttaggcatcggaagcaaaaataaaaaataaaagtaaacacaaggctgaaggaaatacaccaaaaagttaacggtggtgagctgggtatggtggggcttcacacccttcttttgtcttttccctatctcccagaatttccttaggagcaggtgctacttttataattaaaaagaaagaaagagagagagagaaagaaagaaaaagaaagaaagagaaagaaaagagggagggagggagtgaaggaaggaaggaaggaaggaaggaaggaaggaaggaaaggagacaaacaaaagccctccaaaacatggaaaacagtaaaggcaaaaaaaaaaaaaacagttaaaaagagcaaaaaccaccctccccaaaacaaaaatagccccaagcaatccctccataggatcaacagggaactaagacaagcaggtgaaaagaccacactgaagtcagacctcagatcataacagaaacaaaaagcaggtcctaaggcctccctctggctcccccccacccaccccaccatcctccagcttcggacacagccctgcgatggagctggggctatgttttgggggctgcgttttggtggtgacacagcatttcccagggctgctgtaatgaaggaccacagaccagaagcttgaaaacaacagaaatgtattgtctggcagttctggaggtcaaagtcaaggtgctagtcgggccgcgccccctctgaaggctccaggcaagagtctttcctgcctcttccagctggaggtgctcgtcctggatcctggaagcccccaagcctgcagcagcatcactcccatctctgcctccatctccctgcccctcctgtgtctgtgtgtccgtccgtgtcttttaaagacatccgttggatttagggccaccctaatccaggaagacctcaactggatccttcccttgatcccatcagcaaagaccctatttccaaataaagtcacattctgaggttctgagtggccatgaatttgcggggaagggagtcactatccaggccacggcagacacagttccccgaaactgaagacgtgtttactcactttttttggacagggaagctcggctgtgggtgcgaagcaggactgccccccaaggccaggcaggtcctcgaggagcatctcccagtccagtctcagcgggcactggcctggcactcacgctcggggtggggggcatcccaggccctgagactggtgctgggtccaagggtccccatccggtggcagccattccgcattgatctccatttgcttttcaaacatgcaattctcataaactgtgctaaatgccatttagtagctaattaactttctgtgtgaagacctctctaattgcgcacactcccccctcggctgggtcctcggggatgcccagctgtcctagagtatttgttctgctggctcccacctcgcagccacaacttcaatgcccacaacaaactgccaatcaaggctgtggaggtcaaaggggaccaaatcaggggccctctgctactaccaaactctcccggcaaagcttaatttaaataagaaagcagaaaggttatgaaaaaccatttttcccaacgaaactcttctgccaggcggcataaggggcgcggccctccgctcttcagaacggctggtgtctgctttgaaaggtcctgactagaatctgtttatattttgactgcactggcatctgccatccctcaaacggagagataatcaggaaataaaagcttttgattagcagctgcatgaatcactgcagtgccaatttcctcgtggtcccaaagtgcgggagggagggcaggaggcggcaagcatgggtgctgggtccacctcacccacttggggcaaagccatctctcactttattcactggtcttggacttggggccccaggtctatatcccaaggccacgttcgcttcataaacgcaaggtgatctctgagcacctcttagacagaagtctgggcagacgcaaatgtgcagcgtttcaaagcaaagctcaagagtggattcctcagtgcagtatcgtcagcgttgcagtggtgggtaagaggccccgggattatttttggagggcccctccctgcagagcaaccacgtgaggactccctaccccaggaccttccaccagaaaaggccaaagagagaccacacgtgccgccccctgccgaagcctggcctttgaaggatgaacggcaaggggtatgtctgccctgacagagtgaccagtacccgcagcacccgagttctttgcctcttattaaagggcagagccaccatggtgggtgaacgggcttcctctcggaaaccaacatcctggttgggttttcccttccaaggaaggctctacacacccggccctcctcagagcctcagcccgcagcgggagatgacacctccgatcaggtccacgggaagatgggggtgaacgagaagcctgaggccgggccggtgggagggcgtgatgcatgggaggagctggactgcggtcagccgtcccctcgcgccctccggtctctgctgctgtgtttacttggctcccttcccgggatggccttgtagcaaatccatctgggatatgttttgtttccacagagggaccctgaattttgaggtggggccacagaacctcccttgagagccagaagagatcagggccaggatgggtcacgggctgtgcccagtgtcgctgcccaaggcagaactggctgcccaccaggggcaggagactggatggtctttccaggccctcatcccaaactcaagcactggagaaaattgttccagagcgtctcggtctgggtgggagcggggaataagcatttctttaaggaattttttttttacttttttttcagactgggtcttgctctgtcacccaggctggagtgctgtggtgacatcacagctcactgcaacctccgcttccacctcttgggctcaagcgatcctcccacttcagcctcccgagtagctgggaccacaggtgcacgccatcacgcccagctaaattttttattttttatagagatggggtctcgctatgttgtccaggctgatcttgaactcctgggctcaagcgctcctcctgcctcggcctcccaaagtgctaggattacaggcatgagtcatcatgcctgacctatttttaaaccagaataagcaggtacagaagtttgcctggtgaccaggagtcatgactctttccgaatgaaggtggggatgggggtagggaatgtccccatgaaggtagcccctggctgggcattttccactcccagccacagcctccctctgcgggcagaaccctgggtgctgcagggagctggttctcagggaaaagggaattaagtcagtactgggagatttgggttccacagagtttaggggctcctacaaacagcggcttacgggctggtgaggaatttcccatcctgaagcttttaaagcagacaaacacatgagtgctgggtgggggcggggtgctgggagatgcagaggctcagaaaaaccctccgaggctctcggattttacgcctgcatgagatttcgagggaagaatcctaaatgtggggaaatgaggttgcccagcaattctgaatgtggtttaaaaaaaaaattaggtgggggagaatgagacgatattcaatatttccttctgattcaaacgaaatacttctaagttcttctctgtgaaagcgtgtgtgtgtttagaagggagagggggatgatagcacgtcctgccagaagccgttttatttactagtttggatgcttcccctgacgcctacctgggaggtgcttgcctggccaccagccagggccgtggctcctcggcaagtgggcgtccgccgagcctttgatgcactctccaaagtcacagagcaaaacaacacgctgaacaaacaccaccaccctgaaaagtcaccagcccatgggcctctccctggctccagctgtggctgatttacccaaactgaaacattttccttttgtcgactgtagagagctatgagtcaggtccaagctccactgggcgtatgcccaaggggcagagggggcagcaaccggacggaagctgcccaatcataagaccatggctgaaagtcaaacgcgcccagagtccacagtcgaccacctcccgctcggcaagccagggtcctggtgaacgcacgtgcctgcgttctgtaccaaacagttgtcaacacacaccagcaacttaacaaatcaactccaacaaaggggaaaaaattaacattaagggcaaaaagactttttctggagggtcctatgcaccagatgttggctctttaattggcagtcaacctcaaagcaaaacttagaaggcccctgcttgttttatcagttagagccacagaaaatcaaagtccaatcccgctaagcatggtgctgtgtagcccggccagccccgtggaagtcctcagcctggtcccgtcttctgggctctgctgggctggacggtgccaccctccccaacccgcacctgcccgccggccccaggccctccctcaggacccagcaccttcagtcctcctgccgagaagaagcctttcatcagtaaaagagaaaacggcttctccaaaggaagtttcttaacttgaaaaaacaccatgattagggaaactcctccatcgtccaagatacaaacacaaactcccaaacacctgtcaatccttctcagggctccacatggcccaaaggacaccccaaatgtggaggaccactcaagaccctcaaatgcagcaccgtgtgccccctgaacagggatccccacattcgatgaaaacaaaattggccagcgcaggaacttttgcccatgacttaagcacagcaaagtccccaaagccagaatccctcccaggacctgcccgacgggttttatcactggacgcatcaaagcccctctcactggtggttggttcagcagagccctgggcctcgggcctgccctgctctgacagctcccacactgtggccttgatcgggcccttttccactctgtgcctgctttgagtaacaggctcccacaaaaacactgtgctggggtatttccaggatgaaaagccacggttcgctttgcctgccatggacagagtcataaatacgagttgtcgttgcctcttcccaacagtctggcatggcaaactggccttgtggagttcggaattgttctagatactgctcatgtattctccagcagctctagctggttctgcccagatacctggcaatgccaaaggccgagaggccaagacactacaacctttgttcaaatacacgaacatcctcaaatacacgaatgtcctctctgcacaagcagagcagcctcagcatcggccctcgcaagtcccaccagagaacggtattgaaaagatgactggggtcaaggggtgcggagagggacccactgtaccctcatggccactctagcgccagcccttctgtaatgaccccctctggattcccaaaagtcagccgaggggtccccaccctcctggggtggctggggtgttgctgcccacccccaggggcaggcctgtgtgcagcatccatgcccagaaacctgcgctcagatttcccagttcccagaagacaacagggagagtctatttttctaagctcactaggtaaagtgttacttcctgatctaatcttgccaggctctggaagcttccgtcaaggttttcccacactccatgtcaggtctctgacatgaaccagctttcagagtctaacgactagatttgactttcagctgctcggacggaggcttcaactcagcctgaactagccgcgtggacagcagccgtagccctcacaaggcgtgtgcggtgacgggtctcgggcgcccagccagcgaggggccggctccaggtggtgggagcccacgcccccggccagcactctggccacagcgcagcacctgccccatgagagcctcctgttgcagcccgggcagaggtgagcctgggcagccacctcccacgtgatttcccaatgcttgaagttcacgaccaattgctggggtggggacaacctacacaggcttacagacctaatccaagaaggcagttctcaaaaggatgggaaaacgtgcaccagtctcacagtcccagtcaccttaaaaggtcttaactgatttttccttctctctgtttattgtggtaaaatgtccataacataaaattcaccaccttaaccgttttcaacgtcgagcccagtggcattataccattcctatttttgtgcaaccatgacaccacccatctccagaactctccttcttcccaaactgaagctttgtctccatgaaacaccagctccccaacgtcccctccctcagcccctggcaccccaatctttccctctctgagcctgacaactccaggggtcgcacacaagtggaatcacacagatttggccccttatgtctggctcatttcactcggcgtaacgtcctcaactcatccgtgttgcggcgcgtgtcagaattgccttcccaaggctgaacgttccgctgggtgtgtgtggaacatgtgtgtgaacacaccgcgtttctctagtcacccgtcgggggaacttggacgctttcaccatgggctactgtggacggtgctgctatgggcaggggtggtcatgtatctgagctccttctctttatttctgacacttctatataaccatgaatcatctatgaaataattttgacaagcaagaggttcacaaagtaaattccagacaaagccaccctggagacccagctgggctgtcccgggggcggtccctgcgtccacgccgggagagcaggaatgacacaaagcaggctgcatctggctgtgtcaggcctcccacccatcccatcagccaggcatctctgctttggggccagaggtcaaacgtgtctgggttccgtgtagtctcaggggaggctgaggctgacgcgaggtggggtggggtgaggttgtgctggaggctctccacctctccacccaccagacacccagagaagaggcggaaagtcagcagggaaggcagaaggctgctaagagtggacaggatgcaggagtggcgtctggctgaccctgaccagggggacctggcccaagtgagtgtgcaccccagcccggccctcagaactgcttgcaggcacttgcgagttaatatccacgtgatttaggattcaccaaaatctgcttggaaggaggcagggaggcaagagggaggtcaggtggggaggcgcgcaggcagtgctgccctccagccacaggcaggtgggggtggggcggggcggggcggggagggggagggcgggggcgtgcaccgcaggcagcggccagccctgggctgatctaggggaagcctgccatctgctgggcaccgggatccctcccggagcaggagtgccacctccacgcagatggagtttgcaaggggcggtgccgccatcttcacagaggctccgggcagctggcgggggtggggggatggttgggggggccgtgttggccaagcccaattctggggtgggagaaaacgagcaacactctgcaaagggccgggggcctggtggcccccccatcctcgccggacctcaatgtcctgcgtacaagcctgtcccggccgtggccaccggctggcttgtgtgctccgcctgccgggaagcgctttccccctcgtggaccctacaaagacgcctctctgcaggctcccctcatgctgcgggcacacaatgcgtcctttcacccggggtgggtctggcggaggcggcccctccccggggtgccccccgctgggcccctgaccccacactccgctgctgttcttggcctgcgtagacccgtccctttcaaccgctgtcaggaaactgtgtggacgaggaatccctgctggtcgcgcccgagaccatctctctgcgtctcctagaaggggaaaccgtgacccacatcaaactgtggccgttggaaaggtgaacacacggagcctggggccggtggggccagggggtggggtatccttgcacccgatgtcacttgacacccgtcccggcagcccgccaggctcggagagagaccgtagctaccaaaaataatcctcccagtgtttaaatatttacagaagcaagacagatcctgatgcctttacaatctactggagtctgccctaaccgccagtccgaggctcccaggagaggccacagcgaccacccacccggttttcggggtcccaggtcgcctctcctctccctgtccctgcctgatatatatcgcagggctcctcctccggtgaccacatatctgccactagccctctccctccttccagaacattcccacttccaactctgctctcacatcaccccagccccagcacctaccttgagacagctctttctgctccagagcccctcggggaaagcctgctttctctgcagagcctgcacctcattttgggaaccagtgaacaaaatgtaacaagaggcatttgtccatgtaaccccattgtccatgtaacccctggggctggtctcgaccccactcccctcctggggacacaagggtgagacggtacagtaccaggccaacaccagtcccagcggatggcacagagatgggcactgctctcagggcctgtccagatgctacttctcatgacagtctatggggtggggagcactagcgccagccccattgtgcagaggggaaactgaggcaatgagggtaataacccaccagcacacagccaggcagagctgggatgtggccaaggacttggctccaggctcccacacttaaagatcatctctgtcaccacctgggggtaataaggtcagggatatgccccaggccgcctgcttccaccagccagtccctttcaaagggcggaggtttccagaagtgtggctgagtgtctgtctgttcttgatggtcagggaaccttactttcaggtccccaaagcagattccctgaggccaggaggcacttaggtggacgggcaccaggagccctgtgtcctctgccttgcaggtgtttagggaacattgttcagactggaaggaagagccacgtgaaaatgccctttctgtttactctgctgggaaggatatgaagccaaacagaaccagctacgggagtctttcgaccgcaagacaaaaggtcctttgcccccactacctgcaactttcagggaagatttcatcaggtgctgggttacattgcaacagccaggcgtggttccccagaggtacggtgtgagctccccaactcaccgggagacaggcgctgccacatcactgcctctgggagcccgtgacctcatgctcagagctctcagaagctcacgtggcctgtgaggcccctgccagggctgttgatgcaagagctggggctcgggagcctcccaagggcagctctgtgtattcagagcagctcagcccctcgagagcaccaggagcccccagcccccatgcaaccaccggccggggttgcgtcaaggcctcccggagcagctgtcaatggtttctgagctgcggtggaaaaggctgacaagtttcatttccctgaccttggacagccctcctgatgcagggagcgcccatccctggggagcactgcctctccaggagcctgaacttccttctttttggttcaggaggtttgaggcacttatttcctccctgtcctgacagttttactagaaaggtcagctttttaaagagctgtcagtccttcggaagacagtcaataacagcatggtttaagacggcccaccagatgcactggctccgcccccatctctttagaatccagctcccttgggggacatacctggctggtgacttctagaatcccagctcagggccgggggggtgccagggctgtgaacccccgacaagaggcaatgaaaccccctcctcctagaggctgcccaaccatcaaggacaaaggaagagggagtccatgaagaagggctggccagagaatattttgttttgttttgttttgtttatttttttattgagacgaagtctcactcttgtcccccaggctggagtgcaatggcgtgatcacagctcactgcaacctctgcctcctgggttcaagcaattctcctgtctcagcctcccaagtagctgggattacaggtgtctgccaccacgcccggctaatttttgtatttttaatagagacagggtttcaccatgttggccaggcttgtcttgaactcctgacctcaggtgatccaccagcctcggcatcccaaagtgctgggattacaggcgtgagccattgcgcccggccgagaatgttttttcaaaaaagcaggtcgccaatctgtgtagactcgtgctggccaaggcagtgaccccaagccacatgtggcatcacacttgagacgtggtctaggtgtaaagtacacgcgaaattcccaggacttggtaaacagagagaatgtaaaacacttcccatcggcggccgtgtatactgatcccacattggaatgatactattttgaacaagctgggtaatttacaaaaattttcacctttttgtttgttttctttttgttttttgacttgtaaaaatgtagctatggccgggcaccgtggctcatagcctgtaatcccagcacattgggaggccaaggcaggcggatcacctgaggtcaggagttcaagaccagcctggccaacatggtgaaaccccatctctactaaaaatacaaaaattagctgagtgtggtgaggcactcctgtaattccagctactccggaggctgaggtaggagaattgcttgaacccaggaggcggaggttgcagtgagctgagatcgcaccacggcactccagtttgggtgacaaactgagactccgtttcaaaaaaaaaaaattgtacctataagacccacacaaatatgcccaactgatattggacaaaagagcaaagcgtctcaatgaaggaagagcagcctcttcaacaaacgacgcgggagtcattgcacatccataggcaataaataaataaataaacctcgaccccgtaaaacttttaggaaaataacaggagaaaaccttcaggatcggccgggcgcggtggctcacgcctgtaatcccagcactttgggaggctgaggtgggcagatcacgaggtcaggagatcaagatcatcctggctaacacagtgaaaccccgtctctactaaaaatacaaaaaattagccgggcgtggtggtgggcgcctgtagtcccagctactcgggaggctgaggcaggagaatggcgtgaatctgggaggcggagtttgcagtgagccgagatcgcgcccctgcactccaacctgggcgacagagcgaaactctgtctcaaaaacaaaaaaaaagaaaaaaactttcaggatctaggactaggtcaggagttcttgagcttgacatgaaaagtatgattcataaaaggcacaactcataacctggacttcatcaacattaaagtcttttgctttgtgcaagatcctgttaagaggatgaaaaaaagaactacagactgggagaaatatttgcaatcctcatatctagcaaaggactagtttctagagtgtataatcaactctcaaaactcagtagtcaacaaacaaaaaatggattagacgatgtctctttgtctctttgggtatctgtcttcattgcagtgaatcgtttgtatacattgttttattacagtcacaaaagaaatcatgtattaacaggaataaaaaagcaggttgttacctgtcactagaacaatattatcgcttctggttgccacaataaatcatattatgactttttccaaaatcctccaaccaaaggttgtccccataagcctttcgatatatattattaagatataagaagatgcttaagagacaaagagatcttccgccaaagaatcagatacctggatggcaaataaacacacaaaacgatattcgacatcacgagccattagggaaatgctgattaaaaccacaatgagatgtcactacacacccatcaggatgcttaaaaaaaataatagtgacaacctcaaatactgatgaggatgtggagaaacaaggcactcgtaaatttctggtgggagtgtaaaacggcccagccactctatgcaacagtttagcaattgctttaaaaactaagcacataggccgggaacggtggctcacgcttgcaatcccagcactttgggaggccgaggcgggaggattgcttgagcccaggagttcgagaccagcctgagcaacatggcaaaaaccctgtctctatttttactagataaaaaacgtattttaaaaaactaatcacacaatcaatccacatatgactcggcaagtgcatttgtgggaatttatcctagagaaacgaaaacttaggttccaacaaaaccccacacatgaatgttcctagtagctttattcacagtcgcccctgaatgggaagccatggttcatgtccatcagtccgtgagcgcgtggaccgtggggtgctgctactcagcagtagaaaggaacaagttcttgacacacaggacagcttggatagagcttcacaggatgatgctgaaccaaaaaaagtccatctcaaagctgacatcatgcagggttccagttacgtaaaattcttacagaggagtggttgccctgtgccagggcagcgtggaggaaccctgcggtgggggagtggttctgcgtctagctagtggtagtagttgccggaagctacatgtatcccagtggcacaggattctaaacacacaagcacagatgggtgcctgtaatacccgtgagacctgtggactgtaccaacctcaatttcctggtttggagagtgtactatgcttctatgcaggatgtcaccatggggggaagtgggtgaagggtgtatagggcctcccggtactttttttttttttgcaacttcctgtagttacttcgaaataaaaacttttaaacgtggctaatggaaaattttaaatcacagaggtggctcacgttacatttctattgggcactgttagcctaaaccgggggatccacaaaccatggcccgagggccaaattgaggctgccctctgcctctgtacagcccatgaacgaagacttttttaaatgaatagactttcttttttagagcgattttaggttcacagaaaaactgagcagagtacagcgagtttcccctcaatgtacacactttcccataccattaatgtcttgcatttgcgtggtacatttgctgtaactgatgagccaatattgatacattatcagtaataactgacgttcagggcttctactaggttcactcttggtgttgtacagtctatggggtttcagagacacagtggcaggcgtccatcattgcagcctcacacagaatagtgtcactgcagccgggcgcggtggctcacgcctgtaatcccagcactgtgggaggccaaggagggtgcatcacctgaggtcaggagttcaagatcagcctggccaacgtggtgaaaccccgtctctactgaaaatacaaaaattagctgggtgtggtggcgggagcctggaatcccagctactcaagaggctgaggcaggaaaatcgcttgaacccaggaggtggaggttgcagtgagctaagattgtgccattgcacttcagcttgggcacaaagagcaaaactctgtctcaaaaaaaaaaaaaaaaaaaaaagacaagaaaagaaaaggaaaaagaatagtgtcgctgcctttggaatccagtatctgcccatttatctttttctcctcttgagcccccagcaggtgttgatctgtttactgtcttcacaattttgccttttccagaatgtcctagagctggaatcatgcagcttgcagccttttcagactggtgttttttgttttttttgagatagggtctcactctgtgacccaggttggagggcagtggtgcaatctaagctcactgcaacctccgcattctgggctcaagcaatcctcctgcctcagccccccaagtagctgggactacatgtgtgagccaccatgcccggctaatttttgtattattattataattttttttttttttttttgtagagacaaggtttcaccatgttgcccaggctggtctcctgagctcaagtgatcacccacctcggcctcccaaagcgctgggattacaggtgtgagccaccgcacccggcccagattggcttcttccacgtagcaatgtacatttcagcatcctccacatctgctcaaggcttgacagctcatttccttttatccataaacaatattcccttgcagggaagcgccaccgttcgcacatccacccaccaccacagggtatcctgactgcttccaccgcgcccgtatgaatgaagtggttacaaacacctgcgtgcaggtttcatgtgaaggatggttttgaacatttttaaatgttgaaaaaaatccagaggagaatatttcacaacacatgaaaattatatgaaattccactttcagtatccttaataaaacgtgaatggggctgggcgcggtggctcacgcctgtaaccccagcactctgggaggccgaggcggggggattacctgaggtcaggaatttgagaccagcccggccaacacggcgaaaccccatctctagtaaaaatacaaaaattagccgtgtgtggtggtgggcacctgtagtcccagctactcgggaggctgaggcaggagaattgctttaactcaggaggtggaggttgcagtgagccaagatcacaccactgcactccagcctgggcgagagagtgagacactgtctcaaaaaaaaaaaaaattaatggaacacagccatgccaattaacatacattgtgtggtggcttccatgctacaagggcagaattgaaaagctgcagccaaaaccatctggcccccaaagcagaaaatacttgctgtctggcccacctgccaacccctggaatagacaattacaattcccaactttgaaagtccaggaagaaaaccaaccaaaatgataacggcaacaccagagggatcaaagatcacaaatatttcccttctgcctttcccccaaatttctttttttttttttttttttttttttttgagatggagtctcactctgttgcccaggctggagtgcagtggcgtgatctcggctcactgcaacctccgcttcctgggttcaagtgattctcctgcctcagcctcccgagtagctggaattacaggcatccaccaccacgcctggctaattttagtactttttagtagagacggggtttcactatgttggccaggctggtctcgaactcctgacctcaggtgatccgcccgccttgggctctcaaagtgctgggattacagacctgagccaccaggcctggccaccctcgaatttctaaaatgaacacaatctcttttgtctctttggaagcccatttctatagtgtctttgccggggccccagcaacctgtctgggactcctgaccagactcactcgctcagctctaggggtcgacgaggctgggccatgaggagcaactgacatgacagaaacaaggagtttctcagggccctgattgtgtttggttttttgctttttgtttttaaccagagtcactgctcagccatcacttgtgctgaaggcttgagctctgcgtcaccctttcctaaaacggggtgatgaccacactgatgtcgggagctgtttctgggattcaggttggcacccatagagcatatgccgcggtgaacagtgctcccccaagattcatgtccacacagaagctcccaatgtgaccttattcagaaatagggtctcagcagatgtcaccaagctaagatgaggtcaccctagatttgagtaggccctatctaatgactggcatccgtatgagaagaagagagggcacacaaagggacacaccctgtccatgtggcaacagaggcaggggtcggaatgatgtggccacaagccaaggaatgcctgcagccactcaaaccggaagagaccaggaaggaccctcccctagaccttccagagggagcgtggctctgcagacaccttgattttggacctctggctccaggactgtgagagaatacatttctcttgtttcaagcacccggtttgtggtcctttgtcacagcagccccaggacactgatacgagcacgtccaacggggctggcaactcagtcaggtacacagtgatgatgactgtctatctgccctgtactgagccctctgtgcagagctttacacgcacggccttcctgaacccccacaatgcccccacttcacagaggagtaaactgaggtacagagtggttcaacaccgtccaaggccaccccctgcgggtcttgagtggagcttggattcacagctgggtctctgaccaaagctcacttacaggcctcacccaaccaagcccgccagccccttctctgcctagacatcatgtgtgagccaaacagccatgccacagttgcacaccagagggctgggcacggtggcatcccagtcgaattctttggcagcccctccaagctcccagagctgaggggcagccagggaggggaccagtgctcggctgggcgcctgcttggcttctccgcctgacagtgagactgctggggcgaggctatgtcctgtggccatttctagactgactatggccacatgccagttcatggggctctgaccagccagctgcccttcccgtaacagcttccctcagacccctggcatcggccactctctgggtgcaggcggagcagctggtggtggccaccttggcttgggcaggggggagtctgggggagggaggaacgccacacagagcctgccaagtgctacagaaacaagacgagattagtctgaacgacacacagaacagattgcagggtgtcgggcaatgggatgttttaaagaaataaatctcagctcccggttacagaagcacaaacaaacccaaacaacagaccttcaggagctgctggcttcccggctgccaggctgcgctgggcccggaggggtgggcgggggttcctggagcatcctcagggggcggcgggcgctctcggggtatccccgggcgccctggttggcccacgaccgggatcaggggtttgatcctgaaatttgggaggaatggaggatgcagccctcccagctcctggccatcccacctccgaggtctctctgggacccagttgtccctcccctgggtggcggcagctcctggatatctgtgctgcacctgcccctggtccctgctgctgctggagtggcccctaagacacgcacggcccaccctccccactcaccccttgcccccttccctgctgtctcttgccctggaccctctcacatgcccttccctccaccccccgcctcctgctcccttcctcatcccctgctttgtgtccccgtctcctgctccaggctctgatttgctgggcagctgctgcgccccggaacaaagacgggaagggcaaagtgtgtcctgattcgtgtgccaccgctcacttcttcgcccacctccaggagtttctaatcctcctcgggcttgcctggagggttgggcagaaaaggaacggcaggaaacgcagaagggatccggaacgagcagagctttgtgagtccagggcgacacccccagggccttccgtgggagctcctgcaaggatgcttcccagcactgggtcctggcccaccaagcgcactggctctagctcattctcagagactggactcttccccgagagcctcatttctgtcctctgtgccgtgtaggaggacaggggccattacaccaacgatgaacgataacgccgttaataattcagccgctgccgctgatactcggtcgacaaggagccttttcctcctaaaggcagaaagcacttagatgccgtttattactgcctcgcacgccctgcggggtgggctggcacctgccagggaagccatgtgaggtggggagcggccgccccatggggtctgctgtccaagcactggccagctccaggtgaacccttgtgccatcgcccccatgacaggggccaccctgagggagtagaggggccttgtcttatcatctcgtctttcccccattactttggacagagagtttttcgggcctgtcctgctgggagggtcgctacgtttctagggtccaccttccatcctcccaggaacattccgtccagacctgtgctgtcaggcatggaggcctcccgctgtgaccaccaaacttcacattcattgaagataaagaaagaccaaagtccagttgcttggccacatctgctgcatttctagggcgtggtggccacacacagtggggcacaggcacaggaccgcgtgcactgcaggacgctctgctgacggcgctggcccaggcactgggaggaccctgtgaggaagcacccgggaacggtggcgcacgtagggaacaccacgcggccttgataggagctctccagagagaaagctcaggtcccagcaggggtcacggagaagaaagtctcttccacctgcaggtgggctggggattcagcaggagagaggagaacattccagctgcgggcagcaaggtgggaagcggctatgcttggggtgaagtgcccagtgtgtgtgcaggaaagggcaagaggaaagtgggagggcagggggtcccggcagcacccccaggtgggcagcacattgctcctggcccttgcccacctgtggccgcgccaacccgcttggactgagtctgacctggcaggaactgcatgacagaaaccacagtaacaagtggccaaactctgaggccaggccacccagcccatcccaacacccaaacaccatcttgcctaggctggccaccccgggaacgcatgccgggaatgacaagaggacccagggagagagagaacgaaacactcacttccccagggggaggccccgctggcggcacgggacccaaggtggcaggccggcggcactggtgtcactggaaggacctcagtgaccagctcgccctggaggcctcttcactagttagcagcgtgcagcgcagtgggagatgcttagcgtccccaaatgtgcaggttctccccttctgtctatttttatacattggttttcattctaagcttaatataatcacagaataacatttttgaaaacagaaaagtaaaaaaaaaaaaaaagtgctcataatcacactaggctaacacgtgggcacaccttcctctcaacctctgccatccactgccgtggccactgaccacaggcgctatccacatttatattcatcagggccgggcacgcggctcatgcctgtaatcccagcactttgggaggtccaggcaggagggtcacttgagcctaggagtttgagaccagcctaggcaacagagcaagagtctgtctctaaaaaataaaataaatgaacggggcatggtggtgcatgtctgcaatcccagctacttgagaggctgaggtgggaggatcgctcgagcccgggaggtggaggctgcagtgagctgtgattgtgctgccgccaccgtatgccggcctgagcaatacggtgagactctgtctctaaaaacgaaacttaaaaacattttaaaattaaaaacaattttattaatccgtattatgtaaaattaaaaattcagttgcacttgcgccatttcaagggttcaagagctgcatgaagccagtggccgcagtgcgggacggcgcagacctgggttctgtctgccctggcagaagctctgctgggcagccctgccctgagagcctcatctgcacctcaggcctcttcacagagtttaactgcaacgggcagaatcataacccgtttcctgctttgcgtctgattcactctaaatttccacactgcaacactgcatggaccatttgacagtccttgtcaataccacatcttctcctatctggcagcaccgagcttctgaacgttttacaggtcacagaccttctgggaagtcagatggtgcctcctcctcatataaaaaaaagtggggtaagatctcaggggttcgtgagcccaggtttgaaaactccctgatccaacagagggaccttagagggaccttagtcggtccacctcctctgccgttggattcttatgttctgctcctttttccccactgtaaggaataccacgatgaacatcttcatgcagaagcgtttgtctttctacttttattttcttttgagacaaggtctagctctgtcacccaggctggagtgcaggggcaccatctcggctcactgcaacctctgcctcccaagttcaagcgattctcgtgcctgagcttcccaagtagctgggattacaggcatgtgccaccatgctgaactaatttttgtatttttagttgagatggggttttacggtgttgaccacgctggcctccaactgccaacctcaagtgatctgcccaccttagcctcccaaagcgctggaattacaggcttaagccacgtgccggccactttggcctttctatctgtaatttggattctttcttaggatgaggtccagaggagacattttcacttagggagcagaatctggtgtttttgttgttcttgtttttgttgttgttgtttttgtttttgacaaggtctcactctgtcacccaggcttgagtgcactggtgcgatcatggctcactgcagcctccacctcccaggctcaagcagtcctcctgcctcagcctccggagtagcagcttggattaaaggtgtgcaccaccacacccagctaatttttttttctttttggtagagacggggtctcgctatgttgcccaggcttgtttcagttctttatccaggtcaccaatgcacatccccggggcagggtcagtggacacggtaccagccccatggcgccccgttattccacaccctcgcccaactggccttttaggctggacggtagcttccagcacagaaaccaagggcaggatgaccagtcgcgcttggtggtcaccctccccagcacacccgagagccttgctttctgacactgaggagggcacaggaccaagatagcccagggctcacccccggctcggggaagctcagggtcttggggtctcagggcggggaggcaggacgacgcattggcgacagcagctctccgtatcaccccatcccccaagtcagcctcgaatactcacttggtcaaggatttccaggccgtcgctggactggggcctggggcctggggcttccaaaggagacctctgggtttagtaggtgggctcaccttccagcatgcagaccccacctggccatactctacaggtagcacacgaatgtgggcagcccgggggatactgccatttctaacccctaagctcttctgtgaactacttgccaaataaccatatacctgggggaccctaggcccccggggtggggtgggggagttgtccctcctggccaatctcagccagacacgcagcctgcacatgcagttcttcagatccaccactagaggggaccctcgagccagcctacctgctctgccctccggggggactcaactccgggttaattattaatagacgccccaccgctcagagtggcgatgggtgcacccgagtcctcaccaacacccctgcctggcgggatggccagtcatctggggtcctcggccctgacacccctccccaccccagagcaccaggagcgctctcgctctctctcgctctctcgctctctttctctctttctttctctctctctctctctctctcagccccttcacagcaggggttctcaacgctacgtgcacttcagaaacccccaggaagttcaaaacattcccatgcctgggcgccaccccagcgatcctagtttaattggtctgggtgcagcctgggcatcaggatttttaaagctgcccagggcattctcatgggcagccgggctggggacgcctgctctacagcgtctaggacaattaaccaccttagccaaggatctccagtcccatcatacgaaggccccgggggatggggatggggcaaggagcaccacctctgcttcctgggtctaccatgtggtgggggccagaagcgcacaggagcaaggaaagaccagggaaatgcagattccagggctcgcccagcccctttcagaatccatgtctgcttttctttttctttctttctttttttttttccagacagagtatctctctgtcacccaggctggagtgcagtggcatgatcacagctcactgcagccttcacctcccaggcttaagccatcctcctgcctcagcctcctgagtagctgggaccataggcatgcaccactatgcccagctaatttttatgtattttttatagagatgaggttttgccattttccccaggctggtcttgaactcctaggctcaagcaatccacccaccttggcctcccaaagtgctgggattacaggcgtgagtcacagtgcccggcctccatatctactttttaaaaataaaaagaaagctctcagcagtctgtcttggagacaggctgttttcactccagccttgcactgaagcacacgcttctggcggggtggggagagtcccatccacatccacctcgtcccagcacaaagctgcaactcgccacgttcagcgagcctcccctggaccgggctgacacaggcctgaggtgcgagccacaccgagcccgcggccatgtggccaagaggcattttctgagccttcatcaggagcagggccgggctgtggtaagcaccccccagcacggtctccgggtggggacgagtcccaggccaggctcgctgaccccataccccaggctggtgctcaaccctcacgccgactctgccctacaagggggttcttggccgcacttcacacccgtgaggcatctgcgttttggatgtgggaggtaatggccacaagatcacacataactcaggatgatgccaggactggaaacagatctgtcggaccccaaaatttactccttcaccaccatctgcctcccagcagctggggacggacaggcggacagggtgtctcagtggggactcgagtgtcagagcagagaagggggccatggggagggccctcctcagcccagggttcgggggaatagagaagcctcccccaaaagctgacatgaaggtgcctcgccccaggagctgagtctcaaacatataagctggccggttaggagagaggggaaggaggaagcctaggtagaggggatccctagccaaaggcatgaggcagagagagccccacaagatctagaggcagagaggacgacgaacttggaggtgtgcacagtggggggtggggaggcaggcagcatcgctcagcagggccagatggtgatgggccttggaccccgagtgaaggagatggtgcttcatcctgaaaatgatgggcggcccccggtgggtcccaggcagagggacagcctggcttccagagtgagtgcacagcacgcctgtccgctgcccactgatgccaatacatccccaccctcagttgtgataaaaaaaaaaaaaaagtgtctcctggcattgccatacaccccctgggcacagactcggccccgggtgagaatcactgctctagaagaacctggagggacctgggcatcagcgtctaaaggctcccccaggaacccccacatgcagccaggttgaagaaccagcaaggcgaagggcggggaaaagcgaaccggggtgcattctcacaatacccccagaaagtggatattaccagcctcatcttacaaacagggaaaccgaggctccaagaaaagaaagaatttcccaggttcacactaaccagtgatgccaggactcaaccggcactcaactccctaactcctaaacttgagctccctacgagatggggctgcgggacagagagctgaccggccagcttctggttgtggttctgccacagaatcctcagccccaagaccgtgggccaaccccaccacctctctgagacacaactgggaccttcccctcgcctgggccctggggatgcagggacacggggacgcctgcaggttctgctgcactgttggcctggcaccaccagggggagctccgactgagtccggcctgcgggacccaggccaggaccagagttcgggccccgcctcccccacacctcctcgggttccctggcgcctgacgccacccagctcagcaagcctcctggcacctggagtcctcagttacggctcacggcttccttttatctgcactctccaataactgagatgaatgttatcggttcaccctggggctctaatggactgcatctttactggagggataaaatcagggaagaacccgtcccacagtcacccctgctgaggccagcaaagcctgtgtccttacttcatgccccaccactccccggcttaatcggcctggggtgaccttttatgctgcagccctggggcagacccagctgggttcacatcccagcttggcccgggcactggctgggagacccctggcaagctgctgaccttctccgagccgccctttccccttcgatagcaggggataataggagggcccacctcacggggcgtggggctgtggaaagcacacacgtaccatccatagcccacggtgtccagcgcccaggcgagacccagaccacccacgtccagcatgcgcccggctcacaccacgagctcaacagttaatgacctgctcgctgactgatgtcggctcttactgttgtctgtggtcaccaccattatttgcccagaaatctaatgagcgtaaggaccacagccggggcataggaaggggctgtggaagtcggatgcaggccccctgtgctggctctggggctccgggcttatgcgaccacacgggcactcaccccaaggccatgagggccctcgtggcaccatgcaaccctccccactcaggaaggtctctttgggttccaaggcccagggaacccaccgcagggcacgggcccaactctagctcctgcaagtgtggccagcaaggagtccagatactctggctggactccccagggtgcatagcggctgccaagtcgggtgaatatggtcaacactgccccgggactacatccatcctccacagctatgagaaagagggaggctgaagcctccggggaccacagggggccaggtcacgtgcccagtgggctgcagggcagagcggggagctggagaccagcacatctgggcttgggccagccctgtgcgtgagcctaatgatgccacccgggcctcttgggcactcgcttggggactgaaaatctcctgcccctccggtgatgggaacagaagggaccaggactcccgggggcttagccttggtcatgggcccatcagacctggtagggcctgtttagtcctagtgagtctcaaggagagagaagaatgtggacaccccgacgcacccttcacagtcctctcagtggggtgtaaagtggggactccctgctgaagcccttgcctcagggaggggctcctgccacagccacggccacagccgcgggcaggtcgggcagatgcctccagcgctcacctggcatcacaggtgacgcaggtgagtgcttcctgcccaggtcaggccttgggggcctcccgagagcccacgcccagaaccaggaactcacctgctgtcactttccagaaacacggagccgcggctctcggccagcgccgcgctgatgggcgagaggcagaagggcgaggagaaggtgtctgagtctgagtcaaaggagctgtctctgctcacgccctcggctgacagttccaaagagccatcctcctccccggcctcgggccgcggctcccgcccctcctcggtgacatcctgcggactgaccgtcgacaagatcccggaggggctgcaagcaggctgcgaggctggctgggcaccatccacccccaagccctgcgccagcttctcctcatcctctggcgcagggctggcgagcatgcggtctggaacactctgggccaccaccaggatgtcctcatctttgggggtcagggtaggccgcagctccgtcggggagggctggtgggaggctcctgagctccgggtgcgccggccccgagggcggggtgccttgcgaacgggggagctctcgggtgtgatgtagcgcagggcctcctcgtcctgcctctggatgcgagagttggggacccatgccaggatgagggtggctcccagcatctcatccttctccatgtacaagcacaggtaacctgtgaggagccagggggatggcacgttagaggccaggaggctgtggatgaggcccttgtggtacctttggcgagctgctcggagaggccactgccctttagtaaagtgccagtccggcctcagatacagcctggccctgagcaaaaacactagagggaaactgtggagcttgaaatgaattccagctatgcgtgttttttaagaacacacacttccggcagatccagggggcactggtccccaagcaccggcctgccatgcgcctttctttttggtttttgggtttgtttcttttttctttgagacagggtctcgctctgtgtctcaagctggagtgcagtggcacaatctcagcttactgcaacccccacctcctaggctcaagcaatcctcccacctcagctcccgagtagctgggactacaggtgcacaccaccacacccagctaatttttttttttttttttttggtagaaataaggtttcactatgttgcccaggctagtctcaaacgcctgagctcaagcgaaccgcccacctcagcctcccaaagtgctaggattacaggcgatgagccacgaactcaggcttgccatgcacctttccaagtacaccaggggctctccctgtgttcagagccctgaccctggccccagggctcacctgcctgcagcctccctgtctgtgtgagcccagcggcccaggtgcccagcttcatggctttacagcactgttaggagggatggaggctggagacttcattctgtttcacaaaaagaattcatacagccaggcgtgatggctcacgcctgtaatcccagcactttgggaggccaaggcgggtggatcacgaggtcaggagatcgagaccatcgtggctaacatggtgaaaccctgtctctactaaatgtacaaaaaattagccgggcgtgatggtgggcgcctgtagtcccagctacttgggaggctgaggcaggagaatggcgtgaacccaggagacggagcttgcagtgagccgagattgcaccactgcactccagcctggatgacagagcgagactccgtctcaaaaaaaaaaaaaaaattcatccaagctgggtggtatttgggccttttccaatcatcagtggcactcatggcatttttttaatgcagattgtttgaggaaggggccacctttgcagatgagcattgatgtcacacacggggttgctggtgacatgggaggagggatttctcctgggccagagcaagtgggtgggtgctcagttctggggggaggtggcatttcctaacccagcaccacgcagtttcaggatatcctgattcctgggcctcccccacccactctccaggcctctacaactcagacccctagaatctcctaagcactgctcctgttgccaaaacaggctgggaaatttggggaatgtcagccagctgggcattaggataacatgagcctgaggctgagaagtgtttccacatcctttgagatcggcaagagggtccgaggtggctactccctggtctctctctctagaacaccctcaggccaggcaacctccgggtcgaggggccgcatcgcccagaacctgcacccctttctagggcactccagggaagcccctgcccacacagccgcagccaaccagccggtggctataaagatacacttatcaaggcagggggacagaacactctctttaaatgtttcattggcataatttaaacttttgtcttgtttaaaaatttatttattcagtattcgattgaaacataatctgcataaagtgcccagatctcactgtaatttataacttttttttttttaatagagatgaaatctaactctgttgcccaggctggtctcaaactcctgggttcaagcaatcctcccacctcagcctcccaaagtgctgggattataggtgtgaaccacctcgcccagatgacaactttactattttgccatcttgtctgggacttctgtctgtactcttgcccaagccaagcaaatgttagggtgtgccggggcaggccacagccaggctgcaggacactggggccctgaaacatccttttagcagccagggaaggggacggcaacaggaagaaatgagaagagagagtccagagactgccctgcagccccacctccaccacacactggcactgtgcagccgagagtcgctcagcctctctgaacaccagcgtccttacccacctaagaggcctgctggggccctggccactcccatgaggttgttgtgcaaattaaataaagcaacagatgaacaaagcaatgcatttatttgttgcaagtcattcacacgaatgacaaggggccaggcaggcctgagggatcactaacccatcttttgtccctccctttggaagcagcagggctgagggactcacccagcctgccatgagccagacttaacaccccccagaccctccttccgggaggacagctgctgttagttacacgttctggaagaggaaccaaatgcactctcacgtgctgtggcccagggcctttagagccctggctcggaaaataacctgggctgtgcgaccctggagcctcgcctgccctggctcacctgggtggtgctcccccagcccctgcagcccctccggcgggtgcacgcagacattgttcttggagtagatgatctctccatccaggacagagggggacccgctgccgctgccaccgggggtgagggtcaggaggtccgaggctttggaggaggccctgcgaaggaggcggcccagagacattgccgggcaagtgtttccatcctccgcatgcgtcggcccgggcagggctcgtcaagacctgcctgggggaggaagagagaggagatggtcaaggttgtggacttgcgttctgtctcacagcagtacgtgtcgcctcggcacccggtgggttctggttaaccacaggagcgtgtcctgctggtgaacagctctgtacagggtaggccacgttctccatcttggccaggccaccctgtccatcgcaggaggctgagcagcgtccctcgcctcaacctgtggatgccaccagcacctcccttcccagtacgaaaactagaacatctccaggctttgccaaatgtgccctggagggcaaaatccctcccaaggagaaccactaagctacagaaactctgttcccaccttagcaatttcacaaaaacctccacaaaaacgtttttttcacaaaaaaaaacgttttcttttctcagtttcccacctgcatcagcacaaatgagcccttctaattcattaaaaagaaataaacaggcaaggcgcactggctcacgcctgtaatcccagtactctgggaggctgaggcagacagatcacttgaggtaaggggttcgagaccagcctggccaacatggtgaaacatcatctctaccaaaaatacaaaaatgagccaggtgcggtggcgggcgcctacagtcccagctactcgggaggctaaggcaggtgaatcgcttgaacccaagaggcggagggtgcagtgagctgagatcacatcactgcactccagcctgggcaacagagcgagactctgtctcaaaaaaaaagaaagaaggaaaatttataaactaaaggattagtatacagaatatataaagaactcctataaattcatggtgaaaaggagcaacatctcaacagaaaaaaatgggtgctccacacaagaggaaaaccaaagaactgataaatatgtaaagagattctcagttccaaacaaaaattcaacacccaacaaaccagcaaaaagcaattttaagtcaaaaaatactgaggatgagggaaaggggagctgtcaccagtcctgtctcctccaatgcgggagcaacatggcagaatctggcaccactgagaaggcccaaagccccctgaaattcctcccttaggaaatacctgagggtggttcttcaaactgcaatttgcagccctatcatagatcctgaaatcaatttagtgggtcaacaccagcataagaagaaaaaaagaaaaaaaaaatagaaaatgcccttgaaccctggccataggtaggctcagcactgggtcagagaacttctgccccgtgaggacacattcatgtgggtaagacgacctgggacgtatgaaatgtatatataatgcgctgtgacctgaaacatgtgatgactctgcctggaggaacccaaggaaacacctaatcaaatgctttgcagccagtttctaccaacaaaaatgaaaccaccaaacctctagatagcagatgagaaccaactagacttctatacacacatggagctcacaaacacacacaccaagccacgccaaggaacgaccgtgtcagtgaagaggcaggcacagctgggcacaatgactcatgcctgtaatccaagcactttggggggccgaggcaggtggatcacctgaggtcaggagttcgagaccagcctggccaacatggcaaaaccccgtcttgactaaaaatagaaaaaaaagttagccgggtgtggtggcacgagcctataatcccagctactcgggagggtgaggcaggagaattgcttgaacccgggaggtggaggttgcagtgagctgggattgagtcactgcactccagcctgggcgacagagtgagactccgtctcaaaaaaataaaataaataaaaaaaataaaagacaggcacagagccacgctgcatcctgatcactgatgggggatgtccaggactctgaccacagctgggctgcgtgcaggccggcttcacaaaagtctgcagaggtcagggggctgggagacgacagccacagaggggcttcaccttcacctctttgaaggaagaaaagacttgaagccaacatgataagaattagcaactgggagtgaataaaccaaatgtggtacagtggaatattatttggccttaaaagaaaggaaattctgactgggagcggtggctcacacctgtaatcccagcactttgggaggccgagatgggcggatcacctgaggtcaggagttcgagatcagcctggtcaacatagcaaaaccccgcctctactaaaaatacaaaaattagccaggtgtggtggcatgtgcctgtagtcccagctacatgggaggctgaagcaggagaatcgcttaaatccaggaggtggaggtttcagtgagccgagatcacgccactgcactccagcctgggtgacagagcgagactccatctcaaaaaaaaaaaaaaaaaaaagaattagtaactgggagtggataaaccaaatgtagtataatggaatattatttggccttgaaaagaaagtctgacgcctgctacagcatggatgaaccccgaaaacattgcgctaagtgaaacaaatcagtcacaagagacaagcactgtaggattctactcgtgtgaggtccctagagcagttaggttcacagagacaggaagtggaatggtgggtgccagggggtgaggtggggggaatagggaggtcatgtttaagggggacagagcttcagcttgggaggatgaaagcgtcctggaggtggacagtggcggcggctctacaacatgatcgtactcaatgccgctgaacctgatacttaaaaatggttaaagtggtaagttttatgttatatgtattttaccacaataaaaaagttaaaaattatctattagtggagggtctccgggtatatgatcttgttctttgaactttctgcattttttacatttctccaaagatccagagctggttgagggtggtccctaaatcaagtccctttcacctccagcacttggctaggctctgggacagagggtgggtgggtgggtggaggggtccccactggctcagcagaactggctcccagcctggcaggaggcagggggcagatgtcagtggtgatggccaccatcccaggaccaggcggctcagcgctctctgcctctctgggttcctctcctctgaccccctccatgcttcagcctcccccagccctgtttgtgtatttccaattgtctccatggctgctgacttcccaagcacaatattccaaagatgttccagccagcccaggagtggccttcccattcccatgtctttcctctgacagatccatcacccccatctccccatctcagagatcccgacgtcaacatcacttgtgaaaatcaccagttctgggggtggggacccagctcagatcctcacctcctcagccttgagccacagacgccctctgcctgatctcaaccgtctccagggccctcatccactcagctctccctagcccacccctttttaggctccctcaacatgtccaatgaaggctgcagaagaaagtcgaccccttggtgcaggggtcagcaaacttgttctgcaaaaggccagagagtaaatgctttggactctctgggccggagagtctctgtcgtgaccactcaactcggcccttggagtgcaggagcagccacagacagtaaatgatgggcatgactgtgacagtgaagctttactgacagacactcaagcttaaattctagatcatttttcacgtgtctcaaaaagaattctttccatttttcaacccccttaaaaaacgtaaaaaccggccaggcgcggtggctcacgcctgtaatcttggtactttgggaggcctaggtgggcggatcacctgaggtcgggagctcgacaccagcctgaccaacatggagaaattccatctctactaaaaatacaaaattagccgggcgtgatggtgcatgcctgtgatcccagctactcgggaggctcaagcgggagaatcgcttgaacccagggggcagaggttgtggtgagcctagatcgctccattgcactccagcctgggcgacagagcaagactccatctcaaaaaaaaaaaaaaaaaaaaaaagtaaaaaccatccttagctcacaggctgtacaaaacaggtggaaggctggctttggcctgtgggttgcagatggcagtgccctggcatagaccatctgaccaaatccaggggattcttctccacctatccaaaccagctctctgccaacctctccaggaagccttctggccactcttggcctaaacacttcatcccacacaggggcatatgacaaccaagtgacgaaacttaattaaaaaaatcacactgcaaactacaaatcaaaaaacatattgtccttcccaataatcacatggaaaagctatgttctgttctaatgttatccagaatagtttaagaattcaagaattcttcaagaattgcaaggtcagttaataagccctgcaagaaaattgctcgccgtcctctagaccagccatgtccaacagaaacactgcaggagacatagatacaattttaaattttctggtaagcaaaaaaaaaaaaaaaagtgaaattaattttaataatttttagcataatatatccaaaatattattatttcagcatatagtcaatatgaaaacattatttctttattttttttttattttttgagacggagtctcactctgtagcccaggctggagtgcaacggtgcaatctcggctcactgcaagctccgcctcccaggttcacgccattctcctgcttcagcctcccgagtagctgggactacaggcgcccgccaccatgcccggctaatttttttgtatttttagtagagatggggtttcaccatgttagccaggatggtctcgatctcctgacctcgtgatccgcctgcctcggcctcccaaagtgctgggattacaggcgtgagccaccgtgcccagcctgaaaaaattattaatgaaatcttttacattctttttttttttttagagacaggttgtcacccaggctagagtgcagtggtgtgatcacagctcactgtattctgaaactcctgggctcaaggaatcctcctgcccagtctcccaaatagcctggactaaaggcacatgccaccaggtcccgctaatttttttattttttgtagagatgaggtttcacttttttgcccaggctggtcttgaacttctggcctcaagtgatcctcctgcctcagccttccaaagtgttaggattacaggcgggagccaccgcacctggcctattttatgtccttaaagtctccaaagtctgctgtgcattttgcacttaagcacgtcaaagttctgctcagccacgttttgggtgctctgtagcctgcgcggtgtccacactggacaaggccgcagcggggctggagcccacctccttctgtgtttcaaatggctctactcagtgtgatcgctccagttgccagagctggctgcacacagctctcagctgcttccccaaatcaaaaccctctttaagtgaaaatgttttgccagcactgaggataatcaaaagaatgtgctggaagctttaaaggagattccgaaatacaagtgttcaaaatacagcattttctcccataccatgacaggcagaacctcactgtggctctgcgaggtgcgtcccaacagtgcagctttacggaggagaagacaggttctgaccactcagggtcatttcgtgagcgggaaaccctgcagcgtgagaccttcgtcccccacgtgcagaactccggctcctccatcacccgccacctgggacaccaggacaacccccccccgcccctcccagattgttctggagagactgggctctttttggagaaatggagcatgtctattaaacattagacaggactgtttgctctctaaaaacaattctccttatttgtaaagtgcatttgctgtttcgcaagaggctatttcatcgaaatccaacctagttcccaacctctggtcaccagcaaactagaagtggagaatccttggcccattttttaaaacttttttttagttatgaaacacactcagagaaggaaaaggaagaatacgtgtcccttaaatcacataatcctaagacatttatgtattctctactatattttgtgccctataatgaatgagttaatgaaaaacccactccttggaattatatcatatcttgctttcagttggatcataaatatattttcccaggtgaagtatacttatgatataacaaactttagggttgaagtacatcccctaaaattcctgtgttgaagtcttaaaccccagtacccaagaatgaaactgtttttgaagacagcatctttatagaggtgatcaagttaccttgaggtcaatatgactggtgtctttataaaaagaggaagttggtagcaggtgcctatatacaaggagagtgctgtgtgaatacaatgatgccacctaccagcaaggagcaggcctggagcagcccctccctcacagcctcctaaggaaacaatcctgccgacaccttgatcttagacttcctgcctccagggctgtcagagagatttctattgctcaagccacctggaccctggtactttgttagggcagccctagcaaacaaatataccacattattaacacatttaaaaagtataaggccaggtgtggtggctcacgcctgtaatcccagcactttggaagactgaggcgggcggatcacctgagatcaggagttcaagaccagcctggccaacatggtgaaatcctgtctctactaaaaaatacaaaaattagccaagcgtaggggcgggtgcctgtagtcccagctactcaggaggctgaggcaggagaactgcttgtactcaggaggtggaggttgcagtgagctgagatggcgccactgcactccagcctgggagacagagcgagactccatctcaaaacaaataaataaataaaaataaaaattataaatgccaaccctccatcttcatagaatcagccgccattgctaggcatctggcttccaactagtggctactgaaataataaactccacattttaatacataaatcttcatctgtatcctcattatttccaggattactgtttccccaggaggataaactggaccccaactcgtattgcccagtgggttccccgaaatgtaagagtgctgccagggatttaaatctccaccaggctgggaactgaaaaatggttttctgactgggcacagtggttcacacttgtaattccaacaatttgggaggctgacgtgggaggattgctcaagcccaggagctcaaaaccagcctgggcagggccgggcacggtggctcacgcctgtaatcccagcactttgggaggccaaggcgggtggatcacctgaggtcgggagttcgacaccagcctgaccaacatggagaaaccccgtgtctactaaaaatacaaaattagacaggcatggtggtgcatgcctgtaatcccagctactcgggaggctgaagcatgagaatcgcttgaactcaggtggtggaggttgcagtgagccgagatcgtgccattgcactccagcctggaaacaagagtgaaactccatctcaaaaaacaaaaacaaacaaacaaaccagcctgggcaacataacaagatcccacttctaaaaaattagctgggggtggtggtgtgtgcctgtaatcccagctactcgggaggctaaggtggatcacttgagcccaggacgtcgaggctgcattgagccatgattgcaccactgcaccccaccctgggtgacagattatcctatatttattagacatttgtgttcacttgtgaattatctgttggtgtgctttgacaatttttctgctggcgtggtggaattcttattatttttaatacagagattaagctgagatggaattttcattgatatgtaagaactctttatatagtaaagatcactacatacacaccatagacacacaccatagatacatacatcacgcaccacataccataggcacacaccataggcacactgcataaacatcacagacacacacaccacacaccacagacacacacactgcacacaccatagacacatcacacacacaaccccataggcacacaccacactctacacacacaccatagacacacacatccaccacagatgcacacataccatgacacacccaggcacacacactatgacacacacacaccatgacacacaaacacacaccatgacacacaccatgacacacacaaacacataccatgacacacatgtatttctcctaatttgttgtttgccttttatttatattacctattttgacatacggaggtttaaaacttttatgtaaattgatggtaactttttcttagtaacttcctttattacttttatacttaatataatcctttccaagctaaagatcgttaaacattggtctatattttcttctatgttcaatgaactacttttaatgtttcaaaagcctaattcaaagcatatatttacctgaaagggactcacatgttaactaaagtatcgagcagttcattgagtgtttatgttgtttttattgctaggccctgtttttattgcttactcagttatctgacaaaaacactgaaatctatgataaattaataaagctgggacgtttatttttatttatttatttatttagagacagagtttctctcttgttgcccaggctagtggagtgcagtggtgctatcttggctcactgcaacctcttcctgccaggttcaagtgattctcctgcctcagactcccgagtagctgggattacaggtgcccaccaccacgcctggctaatttttgtatttttttagtagacaccagagttcaccacgttggccaggctggtctcgaactcctgccctcaggtgatccacctgccttggcctccaaaagtgctgggattacaggcgtgagccaccacgtccggccctgtttttatttttttgaggtggagtctcacactgtcgcccaggctggagtgaaatggcacaatcttggctcactgcaacctccgcctcccaggttcaagcaattctcctgcctcagcctcccatgtagctaggattacaggcacctgccattacacctggctaatttttgtatttttagtagagacggttttgccatgttggccaggctggtgtcaaactcctgacctcaggtgatccgcccgcctcaacctcccaaagtgctgggattacaggcgtgagccaccatgactggccggggacatttattatataaaactttatggacaattttaagaggtgccttggccgtgacccggaggcctatgtggtttggcccacctcatggtccacaccctctcagctgccgcaacgctgcacatgtgacaaacacgtgtgtgagatccacggttctcatactatcacacgctctggtgagagtaatggctcatcacaggcaagatttaccgcgaaatgggacaggcggggtcattttaacttcctccccaggccaccccctccaccctgctgaaagcacctgcaataaaatacgttttcagaaattcaccagatgtcccttccaaagatcaagcccagctgctcccctcccctttatgggcaggcggccctccaggggtattgcgaacgggctccagcgacagctgctcggaggctaccatgggacagtacccgggcagccacagccctccatgccctccttccgccccgcagtcccagcatgaagccacagttccccatgagcccagggcaagctcgtcagagacccttccctgcggaggcccacagcccctgcggccacttcttccccgaatctcaatcctgcttcgtgtggccactgctgaaagagacgctcagtgccacttagagcgcacagcccactggtccaggctgtgcacacccagggacccttccaggcattcctcacctcggtgcaggccaggagcgagaactgctgccgggcccccccccaccggctcagggcgtggctggggtggccctgctcctcggtggcccgcctggccccgctgtgggcttccctcccaccaccccggccacagtcacagcgggttgtgtcaggccgccctcatctcccacctcccaggcccagctggcgcctccagccctggtgtgaatttccattcagggtccaaaatccaccttggcagcgccctcattctgcagctccacggagccctccagccagagaagagaaatctgagtttaacccgatcctgtcagaagagcgggaggaaagagctccggcggacagggctcccaggcccctccaggacgaggttggaggaccaagcgcagaaggtaaggacgcagccctcggcgagtgcgggcggggcccaaatccctcgccggccggctaagcagaagcggcttttggctttccgcgacaaagcgcagctccgggccagacggtcctgcccggccctacccgcagccccggccccaaccagaggccccacttcagcccaccaggcaggactgcagcggggcacgccccacggaccccagccccttggagatcccaaaccccatgcctgctgctcccaccccggaggagtcagaggccgagaagcacacacaccatagaccccacaccacgcacaccatagacacacataccacacaccacacaccataccacacacaacacacaccacagacacacacaccatacaccatagacacacataccacacacaccatagacacacacactacacatcatagacacacacaccacacacaccatagacacacacaccacacaccatagacacacaccacacgcaccatagacaaaccacgcacaccatgcacacaccacacaccatatacacacacaccacacacgacacaccataggcacacacaccacacaccacacaccatagacacacacaccacacaccataagcacacacaccacacacaccatagacatacacaccatagacacacagacacacatgccatagacacacatgccacacacgacacaccatagtcacaccacacatacaccagacaccaagacacacacactacatacacaccatagacacacatacctaccacacactacaaaccataggcacatacaccatagacacacgcactacatacacaccgtagacacacaccacagatacatacatcacacaccacataccataggcacactgcataaacatcacacacacaccacacaccatagacacacacaccacacacaccatagacacaccacacacacaaccccgtaggcacacaccacactctacacacacaccatagacacacacacacaccacagatgcacacataccatgacacaaccaggcacacacactatgacacacacacacataccatgacacacacacaccatatacacacaaacaccacagacacacacacaccataggcacacacaaacacaccaggacacacacaccatagacacacacataccatgacacacacgcaccccatgacacacaccacacacagccaccctctgctctaccagctttgcctctgttctccgacagcgccagtgttgacacgccagaggctgcctgggccccactccttcccagctgtctccaggattagggaagccccaggcggatccggggccgcaggagcctccctacccagcccccatgctggtctgtcttgggtccataaacacaagtcagccacctgtcaccgggcggcaggaagtgcaggctctgtgagctggaggagggggcgcctaggctctgagggctgaataaggggcctggcaaatgcccccggagagccctggagagttttgcagcagtcctggcacctgggcttcggggcccgcctgctgggagcagccgcctgctgggagcacctccttgctggaagcacccccctgccaggagccccccacccccacccaggagcaccctcctgctagagtgccagggagacactgctgcctaatggccaggagcttgcccagggcagtgacttctggtccacttctgtcccttggttgtgtccctaagacccagggaccctggaaggttcacctgtcggtgtcacacggttccttcttcacacagcaggaacagaggtacagagaatggcgtccaggcctccttaaggactctcaatccatgagacaggaagccccacagggaagcagtggccccccgccccctatctcctcacatacagcactctgtaccttctgctcatttttctgtaaacctaaaactgctctaaacaatgaagtccgccacgcagaaactgcacacggatgttgagagcagctttactcataactgccaacactcagaagcaaccgagatgttctccaacagctgaataaataaataaactgtgatacacctaaataatggaggattatttaatactaaaaagaaaggggcggccgggcatggtggctcacgccagtaatcctagcacttagggaggccaaggcgggtggatcacctgaggtcaagagttcacgaccagcctggtcaatatggcaaaaccccatcgctaatttaaaaatacaaaaattagccaggcatggtggcgcacgcctgtaatcccagctactcaggaggctgaggcacgagaatcacttgaacccgggaggcagaggtggcagtgagccaagattgtgccactgcactccagcctgggtgacagagggagactctctctccaaaacaaacaaacatcatcttctgggggaggggggaatctattagtttaaaataaaaagaggcttgagatcaggaagcttgcatccaaagaggtgtggaggaggcgtggacgagggtggagttgtgtggaccaatgccgagaacaggcaggcactagaggcaggctgaacagagcagagtcaaagacaacgtttggttcctggactgagaacccagctgccggcagcccaagttgtctgatgggagagtttcctaatgtccttgaatctgcaagatgcaagactttgaatggcccttgcccacagcagtgtggagcagttgatgcccatgaccttagggacctggagtcctgcggggtttgaggggggcaaagaaaaccattcgtcctgggaggcaaggaagctggatgtcaggaaggctgccccagtatggaactcagagcaagggggacatccaggttcccttctgcgggcctggggctcttcctaggggccagatgccttctcatcagtacacgaacagaggcgggggcagccagcagaactcctaagacacaaaatgagtgaacactggaaagggagctgagacaggcctgcagcaaagaacagacaccaggcttttccaatctataggaaggactcagagttcatcaaaatcaaaatagcaatgcaagatgctcaaagcaccttgtggcaattattacaaatcccctccccaaatcctgagagatgaagatggatagagaagctgaggaggctgggcacggtagctcatgtctgcaatcctaacagtttcgggagtccgaggtgggcggatcgcctgagtccaggagtttgagaccagcttgggcaacatggtgaaaccccgtctctacaaaaaagcaaaaattagctgggcatggtggcatgtgcctatagtcccagatactcagaaggctgagtcaagagaatcgcttgagcccaggagttcgagatcagcctgggggacatggagaaaccttgtctctacaaaaaaactttaaaaattagccaggcttggtggcctgtgcctatagtctcagctactcaggaggctgaggtgggaggatcgctcgaccctgggagttgaggctgcaatgagctgtacttgcgccactgcactgcagcctgggtgacagagcaagaccctgtctcaaaaaaaaaaagaggccgggtgcagtagctcatgcctgtaatcccagcactttgggaggctgaggcggcagatcgcttgaggtcaggagtttgagaccagcctggccaacatggcgaaaccccgtctctactagaaatacaaaaactagctgggcatggtggcaggcgcctgtaatcccagctacttgggaggctgaggcgggagaattgcttgaacccgggaggcagaggttgcagtgagctgagatcgcaccactgcactccagcctgggcaacacggcaagactccaactcaaaaaaaaaaaaaaaaaaaaaagagaagcagctaagggtagatccttgacaataagaaccccccattctcctcaaatgcatccacttcacatttgtattttgaaacggtgatgtccttgttggtttgtgttttcaataataagctcccgagtgcatgacacctccgagacgctccttttataatgtgcctcccagaatgccatcttcgttaaggttccaaatgccttgtttttgttgatggaaaggatagcaatgccaacttggcagttggcacaaagaattcacagatggattgaagccaagatctacaatttgcatcagcttgagtgtacaaaaaaaagaaaagaaaaaaagaatagccgggcgcagtggctcacgcctgtaatcccagcactctggaaggccgaggcagttgcatcacctgaagtcgggagttcatgaccagcctggccaacatggtaacaccctgtctattagaaatacaaaaattagctgagcatggtagcacacacctgtaatcacagttgctcgggaggctgaggcaggagaatcgcttgaacccaggaggcagaggttacagtgagccaagatggcaccattgcactccagcctgggtgacagagcgagactctatctcaaaaaagaaaaagaaaaaaaagaatgattttagaaggcaaaaagtaaaagcgtcaatgctgattctaaaccatcagaccggggcatgatgaccagttgattttttttttttttgagacagagtctcgctctgtcgcccaggctggagtgcagtggcgcaatctaaggtcactgcaatctccgcctcctgggttcaagcaattctccagagtagctggaattacaggcgcgcgccaccacacccagctaacttttgtattttttttagtatagacggggtttcaccatgtgggccaagatggtttcaatctcctgacctcgtgatccgcctacctcgacctcccaaagcgccgggattacacgcgtgagccaccgccccgagccgaccagttgatttctgtgctgctcaaagccattggtgaccagtaggtagggccagatttctgcaaaataggccattgtgtaattcgaaaggaaagaacaacttggccattcctcaacaaaaatacacaggctcataaaacaaaaaactgtgcagaaactcctccaccagagagtcattctttcccagaaacctgcaactctttaagaattagagcaccattgagaagcatggagtcgcagcacctgcagctggcaggggtgttaaactggtgataaaggtagctgaagtctgcttccaggacgagagcgctttgagggggctggagtagggggagctgcctgcaaggtgaagacgtgggaaacctcagaagccctaaggagagaggggcgggcaggggaggagaggggcagcagatctattctttcacaatgctgttgggaactggccaggctgttgggttggagctgacacagggcgcagctgtgagcctgctgttaaccacacatgttcccttcccgtcccctaggagccacttggccactgaaacttggcctggaacagccaaagatttggtgactcactgtgtgagcagtgggggtgggtcttctctagcaaatattcacagggcatgaggttaggacatctactacccaaaattcactgcccaagatttggtgacttataccctagaaaagagagtcctcctcaatgtagaaagtggcaaagtcaccagaaaaccagaaatgagcaaacacagataaagaaatgacacaaccgtctcccctcttgtctccttttgaaagccctcattccacgcgtatgagcttcctacggctgctgtgacaaatgacacaaacttaccagctacaacacaaatgcataaccttacagtcctggaggtctgaaatctggaatgggtctcacagggctaaaaccaggtatcagcagggctggttcctcctggaggctctaagggagagtctgttttcttgctttttccagcttctagaggtcacccacactccttgctctcgaccccttcctgcatcttcaaggccagcagtggccgatcgagtccttctcatacctcatctctctgaccctgactctcctgcctgatcctgcgattgcatcaggcccactcatataacccaggatcatcccccatttcaaggtcagctgctgagcaaccttaattccatccccaacttgaatccgtggccacgtaacataccatatttacaaattccctggattaggacatgggcatctttgggggccattcttctgccaaccacaccaaaccgaggacactgtaaggagctgatttccaactcgcagggcggcctctgacctgctcacccactgacggtgaaccccccacgcagagtgactactcttttagcagtaggatgaggaccgaggcctagaacccaggagaggagcacgcctgggccccgacgtccctgtgagggcagcgagaatggacacaggtgggctacaggttcatgaccaggacctgcccgtggaggctgcctccacctaaggtcttagtttcctgtcctggcctaaagggcttcatcagttcccaaacaggaaaacaaaaagaacagaggtgcaaaagtctcttccagaaccctcctggaggtagcctggagccactaggagagaggtatcaccccagcctcttctcttgctcactctgtgccgtgcaccggcctcagggccaccttgggttaggggccaggatgcagcagtcagcaggacagacctggtcctggaaacccatggagctggcagttcccactcaccagagggacgcagcccatgcccactagtgacaggcaggggcagaggcagaggcaggcagggtgtgggggccacgggacgcagcccaccaccgattattcccatggccatgtcactgccagactgctcaggagcaacacgcactgagcccggtcacctggcacatggccggcagaaactggttcatctgctttgccctcaaagcccaagcaacaaagaacagggaaacagcgacaccttattaaacacgagccagacacacgcaaacaaggatcgcgttgcccccgctgcagaacgtctgctgctggcatgccttggatgaggccccagcttcctccacctgcccagagccaggcaggggccctacccatcttcctgggaacccctggctttgcgggtcaaagggcgatatggaatcttgtaggcagccaggatcaggacccagtccccgggcagcaggcttggggaaggtagctccttcagtctcatcaggaggataatcccctgcggggccgccgtgatttctcctcgcagctgcgctgaacttcaagttacaggatgaattgagaaaataaagatactggctgcacacagaagccacattcaggatacacccggaaagcctggggcccaaagatgagcctctatgcagaagcgagaacgggacatcaagttgtatttaaaatgaagaaactagggcttagggcattcactgcagtgctgggatcttggaccatagggaaagaggacccctgagaggctataacggggcaggaccatcaccaaaacggtggtgagggaaaacctggtggcctgtgtggctgtgactctccttttgcaactgtccagcggtcaccctgattagcacccactccctggaaaaccccaaagcctctgcctccaaggagagaccatctgccatttgtgcacccttgatagtagattgtaaaatcccatttcccccgcaaagagccaaggaggtcaggcctgggagaagaaactcaactcagaggtgagcctggatctgggactaaggaaagactaaacacaaagggtaagggaagatgcagacccagccaggaaatcaaaaactgccctgagtctggctcaggtacctcctacttctatgctgtgcctgtaaacatggaggcctaaagcttctcagcatctgtcagtgaaggagcagtgaatgcaccgcaaaacaaaactgaaactggggggacatattaacaacacccaaaagcaacacaactgatcttgctttggaaagcattttagttacagaaaaggcaaaaggctgtcaaatgacatctgtaaagttcaccctttcccccacttccagaaggctagagtaatgatgaactatattggagcattgaattcaggctcactcaacatgcaaaaagcagtacacgactgaagtgtgcaagccagcatggatgcgggcttggcacccgcagtacgttggcttcatagtgaccaatccagaaagaccacggagaaaatactgccacatctcagcgtctgcagcccatacaggcaagcagacacatgtatcaccttccaacgcctgcacagactcaccgcccaaggctcagcaacagaagggcaggccattccgactggacagtggatttggattatttctcttttctttctgttattcatgtgtcagaagccaccacgggcagaaatcgaacttagtcttacagtggcccgatttctctcatcctttgaggatggttatgtaagttccgaagacagagtaaagaacgtatttcaaatcagatgccaccagacagctcataaaagcagatttattagagatgcaacatcaggtgctcaaaggacagataggataaaaacaccaacaaagccaacaggataaaaaacactgccgctgaggtgaacggaaaaaggcctccaacatcattgccccatatttttgggaagggtgcaaatgtgtgctctctcctgtgcactggcctcattaacagcaatataatgcaaatgcaatacaaatggtgtacaattcgatcataaaatcatcctctgcgctgtcaccttcacatcccagagccacccgcccccggtgcttaatgctggatgaaacaaagtagctaatcttacaagagaatttaggcctgtgacaaaaatcagggtccctcagccagggaagaaggggagctaaaattttcacaggaggtggtgttgccaggcaacctgatcagctctgctccccatagcatcctgcagggacccagcccccggtcaagttgtaaagataagggtacacatacgcacaaatagtaaatcctacatctgcctggaatcactttccacctcatggaccacacaaaggggagtgaggagtcaaagcacaaaaacaaaatgttttgtgtcaatctagttaaatgtggaaaatccaaataacggtcattaataacagtgttaaaatgttaccatttgacattacttaccacatcctaaatggtaactcaggatgtgtcaggaattcaatgcttttcataatccttgcacaaagtctctgaagtaggtagtatagatggggaaattaaggcactggagaattaactaagtgccagaggagttggggtttttgttgttgttttgttgttgttgttgtttgggttttttaggttttttttttaagcagagtctcactctgtcacccaggctagaatgcagaggctggtcatggctcactgcagccctgacctcccgggctcaagctatcctcccacctcagccacccaaatagctgggaccataggtgcccaccagcatgtccagctaatttgttcattttttgtagcgatagggtctctctaggttgcctaaggtggtcttgaacttctgggctcaagtgattctcccaaaatacaggattataggtgtgagctactatgcccagtccaggatttgtatttgaagccagcagtccatctttctacgccatgttcttaaccactgcaccttattacccaaaactgtggacagagaccagtgcaattgtaggtaggttctgcaaactcaatggctttatcctgaagcctgggggatgctttccatactgaagtgaactgagattagcagctagtggtgacatgggattagtcccacctccttgcactgttatgaaccacttggaagaatgtttgtatatgaatggtgggcaccctctgtaagacagagggcaaagttgtacaacggttttctggagctgggacgtcctgggcctaaggcctaattctgtcactcctaactgcatgagcttgggaagttacttctctaagcgtcagtgttcccatctgtaaatgggcataactgcagtcctgacttcatgagcttgttttgtgggttaagtgaattcatgcatgataattaggaactactaacgcaatcaccaaaattgctagaggattaaataattccacagataaaaactttttttttcctttttttttttttttttgagacatagaatgttgctctatcacccgggctggggtgcagttgcacatcttggctcactgcaaccttcgcctcccgagctcaagcgattcccctgtctcagcctcctgagtactgggattacaggctcacgccaccacaccgggctaatttttgtatttttagtagatatggggggtttcaccatattggccaggctggtctcgaactcctgacctcaggtgatccgctcgcctcgtcctcccaaagtgctgggattacagccgtgagccacggcgcccagccataaaaactttcgccataaaaactttcgttagccatagtctcaccataaacatgccacttacaaaaaaatatgcgcacaataaccacgctcaggatgcaaacaacatccattaatgaactttgtagttaataccaaaagttactcctcactttattctttatttacaaaagctttcatggttcttaaaagtgtttagtattcaccaattttactgttagcgtttctaatgaggattttctaaaactgaggcatggatttgaaaaagtgttctgatcaatcagtaacagatttggaatggaatctccagcccccagtctttgcgcccaccctctggcaatatgccgcctcacgtgagcatctttaagacggagttccctttttattccagataaaagaattaggagccttctggtagaaaagaaagcagatcttcaggatcaagtcgcagaggctggccaatcagcccagcttctcatttgaacttgacccagacagtaaaacaaactttaccataaggcgagactaacttttgttatgtcttttctattcatttcctatttctgaatcaaatctgaactactttgtggccaatatacgacaccagcttccgagtgtgggaatcacaggatttcaggattcagcggcttccggcaggatcccctaggttatgtttagcaatcttcagttgcctttcctttttttctttccttcctttcgttctttctttctttttctttttttttttttcccaaaggaaagaacaagggagcccaggcggaacggaagtgagtatcccgacacgcggatcttaaacagcccagaccaccaagcccgacaggccgggaaagctgagcgcgcgctgctggggggacgcacactttggaggctgtgtgggcgcgcgccggcaccccacaagttctcatccgtctgctccgccgattcagccagacaaagaccgcaagttccccggtccaccgctccagacaggcggggaccagtctccccgaattaggcccattccgggcccgggcgccctcactcgccgcggggaaaagtccccaggtgcccctccgtgatccaggtcctcccacaacgctcccgctcctgctggcgccccgcaccccgaggacggcggccggaccccggcccctccccggtcccgcggctgcaggcccacgcgccccacgcgccccgcgcgcccccgccccagctccgccgagggggcgctgctcgctgcgcggtggacccctcggaccccgcccccgcggccccgtccgggccccgatacccacccgggtcccgctgcgggggccggattcgcgccggctccgagagccgccaccgtcgcctccgccgctgccgccgccagtgaggcgcggcggggcggggacgcgcggggaggcccggcccccggcccgcccccgggcccgcccccggcccggcccctgcctgcccccgccggtctccccgcccaccttctggcccagccctgggcccaagcctctagttccctgctggccctccctcaggcctcgccgcgtcccggcctcggggactgtgccccgtcccgagcctggcgtccccaaaggaaaggcagggctcctcggacgctccgcgtgcgcgctggccctccgctgccgccctctgcagggagatttctcctatttcggactaggaagggaagatacgctccggaagaccccccgggcgtccatgcaaggagtctccgtaggacccctggagaagggcaccggagccccctagggcaggagatggaaaagcgctcgccatgcgcggggtccccggcccccggtgcccccagcccgcctgccattcccgggcgcttagcagtccggggtccccaggtgcccggcaggtcccttcgggacctcgagccgcccgctgggcacacgctgacgccgctgtcgctttacagaaattgagcgcagccgaggcgggacccgggcgcagagagcgataaaggaaaagcatggtcgtgctctaatcattacagtctaagggacgacacgtcgagacggcgcgcgcctctgcgtgcgtggagatggcacaaaggccgcgccgcccccggcggcccccgccctcgcagcgcgcgtggtcccggcccggccggatgttgacagcgtcgcctagcaacgggaaatggcggaaccgggcggcgcggcgggccggtaagccgggccgaggggcagcgggtcttggagtcgccaggccgcgctctccgttcaccgctccaggtggcccccgcgtcggctcctgcctcgccccttcgcctccactcccccttcctctcgcctgtgtcccttctctcgccattttgctggcctttcccgtccactgcgttcagcccctcacccccccgccaacccttctcacttctcccctcctgtccctttgtcctctctcggcctccctctttcccctactccaagcgcgcgactccctctaaaacccgggaccgctcactctgcagtcaccatggcaaccactctgcgtggcggtccctgcgcgcagtcctcctaagagtagagggctctgcagggcgcggggctgttggataccgcccctgaccttgctccggggccactcgctgtggccggagaccagcccggccccgcgcctccctcctgcaaggacagatcccctctcgcaggcttgggggtgacccgcgatgggaggggtccctgcggttaggcggcccgcgatagtccgcggtcaccgtcctggggcctgggtggaagcactgagcgcgcacagggagggcggctgagtgaagatccctgccaccgggcctctgctcgcttaggctctgtttaaaaggatagaaacgattggaaagagtttggcctttttaccttagacacatcggtattgtttcatttttttaaaggtgggtctgtatgtattgacatggaaagactaaaggtattattaataaaacgataggcataaatgtaaaagggtaggtatactatgatctctaattcagggtgtgtgtgtgtgtttaaaacatagaaaaatgttgaaagaatgtggtcctaaatgttatcaatgattatcttgggaaggaaagggaagatcacagggaactgtcactgtctgtctctttgaacatatctatattcctttgacagataaaaatagcttgaatctttaattttttaaaaaagatatacatatatatatatatatatatatattcctgtgctacgtaaatcgtggagaaactcagagtccccagaacacttactctgatcgcgctactttctctacgttgtatttcttttccccagttttgtcccagacacaagttatatttgaggtgacttttctggggtgatctaatcctgctgttccttcgatgttttaataattatatttttcattcattcatggagctttgcttttgtggcatctccgccacctgacaggcatgatatagtgctatggttcctgacaaacaggacaaagacgtgacaacagcctgggggtggcagagaagtaacaagtaaataaacagatgtgcagaattcaggaggggataaggaccaagaaaaagaaagctgttgcttgaaactgttcaattgtttctctaaaaccaggtcccatccggaagatggatcggcttctgagggagagaaggaagggaataatgaaagccacatggtaaaattccctatgggcagttattccgggcttatatttactaggaattaaagagaatcagagtacgggcactgtggctcacgcctgtaatcccaacactttgggaggccaaggcaggtggatcacatgaggttaggagtttgagacaagcctggccaacatggtaaaaccccatctctactaaaaatataaaaattagccgggcgtggtggtgcgcacatgtagtcccagctactcgggaggctgaggcaggacagtggcttgaactcgggagacagaggttgcagtgagccaagatcacaccattgcactccagcctgggtgaccagtgaaactctatctcaaaaataaataaataggccgggcacggtgactcacgcctgtaattccagcactttgggaggccgaggcaggcagatcacgaggtcaaaagatcgagactatcctggccaacatggtgaaaccctgtctctactaaaaatacaaaaatttgccaggcatggtggttcacgcctgtagtcccagctactcgggaggctgaggcaggagaatggcttgaacctgggagatggaggttgcagtgagccgagattgtgccactgcactcagcctggcgacagagcgagactccatctcaaaaaatagataaataaaattaaattaaaaataaataaataaagagaattaggacttggtcaagtatattgtatgatgacattatcttgcaccagaacaaactcaattcagttgaagagagactcattttcttcctaccccattctacagtgtcagtgattagtcagggatgcaaaggatgtccaactttgggttgccctgagtttttcggaactcatttcctgtaacaaaggatgcaaaaatgattatgaaaagcagagagggccaggcatggtggctcacgcctgtggtcccggcactttgggaggctgaggcggatggatctcttgaggccaggaattcaagaccagcctggccaacatggtgaaaccccatccctactaaaaatggaaaaattaactgggcatggtggtacacacctgtagtcccagctacttgggaggctgaagcaggagaatcgcttgaacccaggaggtggaagttgcagtgagccgagatcacgccaccgcactccagcctgggcagcagagtgagcccctgtcacaaaaaaaaataaaaaaagaaagaacagataaactgaagcatgaaacatgattttttttttttttgagacagagtctcactctgtctccaggctgaagttcagtggcacgatctcagctcactgcaacctctgccttccgagtttaagcaattctcctgccccagccttctaagtagctgggattacaggtgtgcaccaccatacccagctaatttttgtatttttagtagagacggggtttcaccatgttggtcaggatggtctcaatctcctgacctcgtgatctgcctgcctcagcctcccaaagtgaaacatgatctcttagtgatgctgagaagggtataaatgcagttttcccattgatataattacactataaagaataaaacctcacaaggtcctttatactttgtttcctgatttttttcctgccacacctttacaggtgtcaccaccagagaaggatgatggccagaaaggtgaagaagctgtcggtagcacagagcatcctgaggaagtcacaacccaagcggaagctgcaattgaagagggggaggtggagacagaaggggaagcagcagtggaaggggaagaggaggctgtgtcctatggagatgctgaaagcgaagaggaatattactatacagaaacttcatccccggaagggcaaatcagtgctgcagatacgacttacccgtatttcagtcctcctcaggaactgcctggagaggaggcatacgatagtgttagcggggaggctggtctccaaggcttccagcaagaggccaccggtccaccagaatccagagaaaggagggtcacctccccagagccatcccacggagtcttaggcccgtcggagcaaatgggccaggtcacctctgggccagcagtgggcagattggtgagtagccctgacttctgttttgtgccagtgtcgcacggcccacggggtttgtcaccctatgtgaggaacttgggaatacattataaatacaaattgcaatccctgttagaaatgtcttagcaaggctgggtgcggtggctcacgcctgtaatcccagcactttgggaggcgaaggtgggtgggtcacctgaggtcaggagttcgagaccagcctggccaacgtggtgaaatcctgtctctactaaatatgcaaaaattaggcaggcgtggtggcgcacgcctgtaatcccagctactcaggaggctgaggtgggagaattgcttgaacccgagaggcggaggctgcagtgagccaagatcccaccattgcactatagcctgggcaacagagtgagaccttgtctcaaaaaaaaaaaaaaaaagaaaagaaatttcttagcaagcttaggtctcaggattcacggtcaaatgctgagagatcctggactctgcttcagtctgcccaagcccaaggctgggggcctccatagccgccatccacgtaagggcatccaagttcccaggcttccagagcagcattgtccaatacggtccatcagtcacatgtggctacagagagctctccaaatgtgactagcgagctggaggaatggagcttttaactgtttaagattctaatttccatttaaatagccacctgttgccagtggctgccataatgaatagtgcagttctagataaaaacaatgacaatagctgcgttcttatattttttcatcaattttctttaaacaatcacaaagttacagaaaaaaatggagtacaataaaaaggatcttttattttcttaaacactggagagtgggttgcggatctggtcaccaaagccttcgaacgcttctgtatgtttcccacaaacagctgggacacaaccatcaaaatctagaaattgggtcgggcatggtggtgcacgcctgtaatcccagcacttcgggaggccaaggcgggtggatcacttgaggccaggagttcgataccagcctggccaacatggtgaaaccccatctctactaaaaatacaaaaattagctggacgtggtggtgcacacctgtaatcccagctactcgggaggctgaggcaggagaatcacttgaactggagaggcaggggttgccgtcagccgagatcgcacccctgtactcctgcatgggcgacagagcgagactctgtctcaaaaaaaaaaaaaaattctggaaattgccttgctccatttccaaggaatgctcaggcctcattcagggttcaccaaatgtcccaatgatgtcttttgtagcaaagagattcagttcagaatcaaatgttgccttgagtgctcatatttctgtagtctcctcagtctttccttgacaaccttgacccttgtgaaggtcataggccagctgtcttgtagagcgcccctcagcctggatttgccccgtgtttcctcatgatggggttagggtcatgaggctttagtgggactatcacggaagcgacgtggggctctcagtgcgtcccaccagggatgcaggattccagcttccaccattcctgatgatgttcacttctgtcaccaaatttaaaagcaccaagattcttcattgtgaagcgaccttttactcctttatacttaatgaagattttgtgggaaggtgcttttttcttttttggtttaagataggaaggcgaatactatttagaatgggaaaaaaattgcaacagattccaaccagttattgaggacttcttatatttgcttacaaacgtatacaggtgttatacaacttttggcagatttatccctaagtatttctcttttttttgagatgtagtctcgctctgtcacccaggctggagtgcagtggcatgatcttggttcacagcaacctctgcctcccgggttcaagcaattctcctgcctcagcctcccaagtagctgggactacaggcacacaccaccacacctggctaaaattcggtatttttagtagagatggggtttcaccatgttggccaggctggtctcgaactcctgcccacaaatgatctgcctgccgcagcttcccaaagtgttgggattacaggtgtgagccatcgctcctgcccagtatttcacatttttgatgccattataaatggtttccaattgtctgtggctagcatatagaaatacaattggtttttgtatactcacctgatattctgccacgttgctaaagtccctcactagttagactagcttgtttgtagaatcggtaggctttttcacaaagataatcatctcatctgagaaaaaagacagttaacttcttcctttcccatccagatgccttttctttctttttcttgcctgattgcattggctagaaccgccagcaccatgttgaatagaagcggtgagagcagacctcttgtcttgccctgatcttacaggaaaagcatcagtctttgactgtaaagtgccatgtttgctgtgggtgttgcagatgccctttatcaggttaaggaagttcccttgtattctcggtttgttgtatgttgttgggttgtttttttttttttaatcataaaagggtattgggttttgtcaaatccttttctgtgtctgttaagaagactgtattttcctttttagttagttgatttggtagattacattgattgattttcagatgttcaagcaaccccgcattctgagataaacacagggagccactttggagtgatgtgaatgtcggttcctctttaaactcttggtttatttatattcttacatctgcatagactcagggctctccatgtgattcactgggttataacccattactgtcattatgtattttgatgctcagtttggccagtgagggcccatttaaaccagcctttgtgtgatcggacgcacctccatccttctttgagggctttcttgctttctgccatagactgcccagccttagaatcagacatttctccaggagccctgtttctgttagtggaaaatagaatttagaagttatcacttgggtgctggggtcctcattgatgctggggtgtcactgtccccaggacctctcagcggcaggagatagggcctgtgtgcgtgtactgtacgtacttcccccacatttatacatacaccatgtacacagacattcgctcacatctatatttattggaacacacccctgcggccggccttggctcacacccctgcggccggccttggctcacaacagaacctctaattccatctcacctccataaggagtccctcctggttttctcctcttccttttttttttttttttttttgaaacagagtcttgcccaggtagctgggactgcaagcactcaccatcacgcccggctaatttttgtattttttgtacaagggggcgtcttaccatgatacccaggctggtctcgaactcctgggctcagtcaatcctccctcctcaacctcccaaagtgctgggattacaggcatgagccaccacgcccggcctcctcttccatatttgtagctcctttctccaacagggagaagcctggccccatgatccttactgtattcactgatgtggtcaatcctcctggatgtaacctgtctcccacttttactgccttggctgccccctactcccagcataccttaggtttcaattgttctgcgaggggagatgggagtatggaagggaggcagggaaagaggatgctttatacttcttagcactgactatgggatagacactgttctgtgttgtcttagaatcctgacaaccctacgaggtaggaactatgattgtgcccattgtacagatgaggaaactgagaggtgcaaggtcattgcatagtcacccagctgttgcggcaaacggtagctcttgcttcaaagccaccgttctgaaccacaaggcacccatccctcctactcccctaccctgggaaacccgaaagagtttctaaaagtcactttggagaacagcatgattcagtatttggtgagccctaattaagttttatgatcacaagtgacaaatataaaaccaaaaccaaaatcttattttaagaatttatcaacaacaacaggccaggcctagtggctcatggctgtgatcccagcactttgggaggccgatgcaggcggatcacttgaggccaggagttcgagaccagcttaaccaacatggcgagaccccatctctactaaaaatacaaaaattagccgggtgtgttggtgcacacctgtagtcccagctacttaggaggctgaggcacaagaatcgcttgagcttgggagtcagagattgcatgagccaagatcatgccactgcactccagcctgggagacagagcgagaccccatctcaaaaacaaaacaaaacaaacaaacaaaaaaaaaaatatatatatatatatatatatctcaacaacagcaaaaccagtgtcttcacctttgtttaagtgaagtctaggtcacttgttgctctgtaaacccgattttcatccttgggcctagtttctagaaaatacactgggaagtagttttcaaatatgattgaagaaagggcagggacagcccctgagcgagccttgcttcccacctcccactggctctcagtctttgggacagtgtgagtggagcttgtgtccagttgtgcacacggacacccggaaacctctcattaggagaagccactgctgcgcaccctggagatgggttttgaccctgggctcccgttaatgttgttgtggctccagatgcctcagaaataacttccagagtcaacaccatctgcggaagtgccgtgagacggtgcatgggctggagacagagacagccggcgccgaacatacctggggctgcccgtgcaaactggggcaagcccttcagcctccatgtggctgctttactatggagaacagaaatgactagaacctgacttgtggggttatggcgagggtggcatgagatgagctttgtaacaatgtgttgtttatgggcagcaaaaccctgactcattgtctgggttactaatatccaagagttcatcatcagcgataattattgtcaatagtcgtaactgcaaaagtctcttttaaagctaaaatggatgccgggcacagtggctgtaatcccaacactttgcgaggccgaggcgggtggatcacttgaggtcaggagttcgagaccggcctgggtaacatggcaaaaccccgtctctactaaaagtgcaaaaattagccaggtgtggtggcaggtgcctgtaatcccagctactcaggaggctgaggcaagagaatcacttgaacccaggaggcggagtttgcagtgagccgagatggtgccactgcactccagcctgggcgacagagcgagagtccatctcaaaaacaacaacaactacaaaaaacgctgaaaaacagagctggggaaaggcattaaggggagggcttctcataacaaaaactatcacaaaagactctgcaaaccccacaatgttgcacaaagatcatcataacctttcaaaaaaaaaaaaaacacttctgctaggacagctgccagcaactgcctgtcgaaacttggactgatgccaccctgttattgatccttacagccaaggagaattatcgcaaaacaattatgtaatcctcctcatttttcctgtgtcaactttcatcttcctttacctccccaaatacaaacataatttactatgacacccgtattcccattgcaatgccctatccccaaataaatgtcattttcctttacagaacctctctctgtttgttatttaggatgatacattgctcaaaatttaacatgattgttaaagtaataggaaatcacttggatataaaaatcatcatttgacttttgcaaatgtccaaaatggaaaacatctaactctcccccgcccagggaattcagaagtggttcccccagctcacacctgtaatcccagcactttgggaggccaaagcggaaaggctgaatgaggccaggaatttgagaccagcctaggaatcatagcaagaccctacctctaagtaaaatattaaaaaattagaccagtgtggtggtgtgcacctgtaatcccagctactctggaggctaaggagggaggatcaccggagcccagaagttgggggttgcagtgagctatgattgcagcactgcacgccagtctaggtggcagagtgagacccttactcaataataataataataataataataaaagagtggtttctgcgtgtctgcatctgtagctaagtgtaaacacccaggcacgagaatgcatgggtcctgggatcttttgctcccacatgctgagcgcctcgaggatgggaaaccacaactctgagcaccctcttcatgaaagcatgcggaaaagcctcggctcctggccagggtctcccaagaggactgtttcctcttctctcctttcaaaccagccccctttagggaaatttcaataagaaaatgtcttcccttcataaaaacacctggctcgattttaactttatttatttatttatttttgagaaggggtcttgctctgttgcccaggctggagtgcagtgctgtgatctctgctcactgcaacctctgcctcccgggttcaagcaattctccctcctcagcctcccaagtagctgggattacaggtgcccgccaccgcacccagctaatttttgtatttctggtagagacggggtttcgccatgttggccaggctggtctcgaactcctggcctcaagcgatccacccgccttggcctcccaaagtgctgggagttacaggcatgagccacgtgcccggccaggttttttaaaaaacacacaggtgactatattttgagtctgacaactttcacaaatgtaatgagttaaaattgaataacttctcagtggcaattaagccctgttgacttagttttggttgttcttgccatagacaggatccacagaggagccccaggggcaggtgctcccaatgggcgtccagcaccgcttccggctgagccacgggagcgacatcgagtcctcagacctggaggagttcgtctcgcaggagccaggtgccacccacctgctgaggtcaccctgccctggcgatgagccacctgcacaggcccttctgtgcaagggatgccactcgtttgtcatccgttacctgtttcctgagtggctgtgagctgaaagagaaaaatcttattaacagatatggataacatttattgggcatttactgttttatctcatttaatcctaacagtgaccgatgaagtaggaatccttctccatttaacagacaggttccctaaggccattaaggaactggtccgattaagtgacagaacgcggccttcaccaagattcagtgacgcccagccccatcccctgacagccatttctcacgggctcctggtctcagagcgagacgtgccgtgacagcaaccccaggcctgaatctgtctgctggctttcaaaggctttccagaacccctgtcttcttacgtagtcccagtatcccagtgttgtggacgtgggagggcagatcaggcagttgcaaattccctgtggtaccgacctgcagccggtccaaacctttcattacttgcaaatgacatgaaaacagcacgtgtctaaattagtaaaaaaacaagccgggcgcggtggctcacgcctggaatcccagccaaggccggtggatcacctgaggtcaggtgttcgagaccagtctggccaacatggtgaaacccctgtctctactaaaaatacaaaaattaccgggcgtggtggcgggtgcctgtaatccccagctgctcgggaggctgaggcaggagaatcgcttgaaccccggaggtggaggttgcagtgagccgagatcacgccactgcactccagcctgggcaacagagcaagactctgtctggggataaaaaatattgtatccaatccactagttaagtggccacctttctgttcactctttatgtgtaaagaaagcctctcaaaaataatttccttcctgcctacctttaaaacgggacgctttctctgggatgcattgagtcagggaatagaagatggggtgaatgatgtttctgacccacagaccgttgggatgcttttgctgtcactttcccatcatgctgcatgaggcatgacagcagctgtgccattgatgccccagaatagaatcactgaggcttctctccagcagctcctcaatggtgtcgctgtctctccccccagtgatccccccaggggtgcccgatgcccaccccagggaaggagacctgccagtgttccaggaccagatccagcagcccagcaccgaggagggggccatggcagagagagtggagtccgaggggagtgacgaggaagcagaagacgaagggtcccagctggtggttttggacccagaccacgtaaggaagccttcccaggttttgcttttgcctacatggatggcgaatgactcaggcccctttctctgcctgcactgtctcccactcctgaccctaaatgctgtacttgtatctcgcctgttcactgcaccgtttattggcactgattgacctgcctcttcgtagggtactctcctctgaggttggtataggtgaggcctgtgtttctcaaccccggaaccactgccccgtggggccgggtcattctgtgctgtgccttgcatggtgtggaacagcatccccgagctccccctgctacatgccaggagcaccacccccccgccttggttgtgatcatcaaaaatgtctccaggctggacgtggtagctcatgcctgtaatcccagcactttgggaggccaaggtctgtggatcacctgaggtcaggagttcgagaccagcctggccaacatggtgaaaccccatctctactaaaaatacaaaaaaaaaaaaaaattagctgggcatggtggtgagcacctgtaatccctgttactcaggaggctgaggcaggagaatcgcttaaacccaagaggcggaggttgcatgcagacagccaagatggcaccagtgcactccagcctgggcaataagagcgaaactctgtctcaaaaaaaaaaaaaaaaaaatgtctccagtcattgccaaatgttggcggtgtggggcccatcttcgcagccactgccttgagggcaccaattggatcgcagctccctgccccacccactggcaaggggaaaaggcagatgttgatttcatttacccatcaggacagctgcagagctccaggaactgccggaaggagctgggggctgcacagggaggttctctccccagaccactgctccaccccaccctctggccccagctcaccatcattttgccaaaatatgcactcagttctctgcaagtgcctcagatgagaccatgaggtgcctttaatttgtggcttccagagtaagaatcccaagcagaagcagggagcactccacacggaagtcgtctctggcccaccggagggagacctgtggccacctgggctgagccctgggtcgggcaggagggtaaccagaaaggtaaccacctgtggttttccattgttctagcccctgatggtaagattccaggctgccctgaagaactacctgaaccgacagatcgaaaagttgaagctggacctccaagagctggtgtgtatccgtccagtctcccaccctggtcggatgcctgcgtcctggtgaccctgtttctctctttggtccaggttgtggctaccaagcagagccgagcccagcggcaggagctgggggtgaatctctatgaggtgcagcagcacctggtacacctgcagaagctgctggagaagagtcacgaccgccacgcaatggcctcgagcgagcgcaggcagaaggaggaggagctgcaggccgcccgcgctctctacaccaagacctgcgcagccgccaacgaggagcgcaaaaagtgtaaggcaacccggcagccccacacgccatccggtcctggagggtttcccaggggtgtctccatgtaccatggccaggcatctagaaaagtaagatgtgtgtgcatcctggaggggttcccaccctttttaggaggggaaggcacataaatcaaatgtctttttgttgttgtttttttgagatggagtctcactctgtcacccaggctggagtgcaatggcgcgatcttggctcactgcaacctcccccttccgggatcaagccagtctcctggctgagcctcccaagtagctggtattacaggcacctgccaccatgcctggctattttttgtatttttagtagagacggggtttcaccatgttggccaggctggtctcgaactcctgacctcaggtgattcgcctgcctcggcctcccaaaatgctgggattacaggcatgagacactgcacccggttataaatatgttaaatggcacctgtcaggacaaagcagcaaatgctgaagctgctaacagccagagcgtagagattcaaaactgggagagatgggtgagctgcagaggtcccaggatagatgagaccaggaggcgagagcagaccgggggtgatggagggtttcaatagatgcgaatgcgagggtgaggccggcacgacggtcagaccatggcccagggcctgaccgccgtaggatgtgtgcggcaggtcagtgggtagctttgaatcagatgagacagtgggggctacagcacgtgctatgcaacattaccgataaagcaacgtccttgcacagagctggtcatgtaggtgaccggggacagtggcttcctcttgtgactacggagtatttcagtctttatgctttttgatgttttcaactttctcaatcaactgtgtattactcttataatggggaaatgacctacacaaacctggaggaaaacagaagcacatggctatcccagctgttctggaaagaaacattttaaaccctgagaaaagtggaagaggttctggaaatttcagagttagggtaagtgggcacttatcaagcacctctcttggctgggcgcagtggctcacgcctgtaatcctagcactttgggaggccgaggcgggcggatcacgaggtcaggagatcgagaccatcccggctaaaacggtgaaaccccgtctctactaaaaatacaaaaaattagccgggcgtagtggcgggcgcctgtagtcccagctacttgggaggctgaggcaggagaatggcgtgaacctgggagtcggagcttgcagtgagccgagatcccgccactgcactccagcctgggcgacagagcgagactccgtctcaaaaaaaaaaaaaaaaaaaaaaaaaagaaaaaagaacctctctccagttagcatcaaatgaacagaaaacagtaaaaggaaagaaagtgacatccacactgaactgaaagagccacatcctccagaagtaaccaaatttacacccacctgaaggaggacgcgtgcccctaactgctccccacacctgcagtgaggctggagccgtggagctggtgtggagcgccctccggctcccctctgctagggcttaaagagtgggtgggattccaaaaagatccaaacactctggtggactctgcttcctggagattaggagagggccagagccgaggctcttcaacccagcaaggcctgcgtcaaacagcaccgtctctgccttctcagaactgaagaatttgggcaacggtcccggccctgaccggggggcagccaccactgcacagtcccttaggtgagacgtgggtcctggcccctggagaaagcccacggtcacctgcctcatctgggagggagactgtattagggttgtctagagggacagaactaacaggatagatatatagagaaaggagagtttattcagtattgacacaggatcacaaggtcccacaataggccgtctgcaggctgaggagcaaggagagccggtctgagttccaaaaatgaagaacctggagtccagtgttcaagggcaggaagcatccagcacaggagaaagatgtaggctgggaggctacaccagtctctcttttcacatttttctgcctgcttacactctagccgcactgtcagctgatgagatggtgcccacccagattgggggtgggtctgccttttcccaggccactgactcaaatgttaatctcctttggcaacaccctcacagacacacccaggatcaatactttgtatccttcaatccaatcaagttgacactcagtattaaccatcaccgacactaaaccttcacaccaaaatgagttaccaacccgagatccccagacctgagaggagactgagccggacagacaggcaaacccagccctgattctaaaaacagagcatgcggaggcaccaactggtagtctcatgagattttagaggacgttgtatccgtaaagagaacaaagtgttaggaagaggggtacgtgaaatttaaaaatataatcatcatcccagagtgtgcagaggcgccaactggtagtctcatgagattttagaggacattgcatccataaagagaacaaagtgttaggaaaaggggtacgtgaaatttaaaaatataatcatcatccccccaaaaggcactaactagacaaatgaatgcagttgaaaactgaatttcttaactaaaaagccagttcgaggaaccttccctggaaatagagcaaaaccccaaatgattgatatcttgaggaggaggtaaaagacatggacgacagattagggaaatcgaatcagtgtccgaaagggagatttcaggagatgagaggcaatagccaatgtccaggagaacagatgcgtgagttcaggaaagacgaatctgcagatagaaagactcgtgacgggccatgcagctgaaagagaaaataaacctccgcagacatagctggtgggatttccaaataccacggcaaaagaaaaaatgctgcaggcttccaggcgggaaaacccagatggcctcttgaggccgggcctgggctacgctttcatcaaggcctccatcagctgcgccttggaggaaccagggagagctcaaaaccaccaggacctatcccagcccagatttcagattggtttgttctgggaaggaccaggcattgtttgtttctggctttctttttgacccttaagcttccagatgatgctaacttgcagccagggctgagaatcacagatcttaaatttaaatagcaggatgtcaatgcatacagaattcagaattctcttttttgtgttttttgtttgtttgtttgtttgttgagatggagtctctctctgtcgcccaggctggagtgcagtggcgtgatctcagctcactgcaacctccacctcccgggttcaagcgattctcctgcttcagcctcccaagtagctgggactacaggggcccgccaccatgcctggctaatttttgtatttttgtagataacggggtttcaccatgttggtcaggctggtcttgaacccctgacctcgtgatccgcccaccttggcctcccaatgcatacagaattctaagggagaaggatggttagcatttgacctacatgtcagttagactctggaaattaacaacaacgggaagtccacgcatgaagacttctggctgcagccaaatctgctcagacaaaacccatgacagagtttatttacatttccacaaacaagcctgaaaacagacattctattcgagaagctaaaaagagggaaataaactgaaagaagcagaaaaataaaccaataaagatcaaaagcagaagctgatgaaataaataaaaaatgaattgacttgataaataaactgctttttttttaaatgaccaataaaccttacacactgctggcttatctggcaataaaaaggagatcatgcaagtaacagtgttgggaatgaggacaacttgggggagggttttttttgttttgttttttgtttttaattgcaagaaagctatgcattgtactggtttcatcatgcaagaaattgaaaatgtcaaaaatctgttttccctaaatgcaccagtattggaagatgttatggaaggcttctagtaacctttcaaggaacaaacacttcctgtgttatcaaagctccagggcatggaagattccggaaactccccacaggctggtcctgcaatgcttagtgaaaggctggctgcaaacgctgacagcatacaagcaggaaactgtaaagcggccccacatgtgaggagtgaaaatcctgaacaaaatgttagcaaaaataagtaggatttacttccagaattcacacaggaataattcacaattaggaaatctactaattttgtgcattatatttataaattaaagaatggaggccggatgtggtggctcacgcctgtaatcccagcactttgggaggccgaggcgggcagattacctgaggtcaggagttcgagaccagcctggccaacgtggtgaaaccctgtttctactaaaagtacaaaaaattagccaggtgtggtggcaggcacctgtaatcccagctactcaggaggttgagacaggagaattgcttgagcccaggagacagaggttgcagtgagccgagactgtgccactgcactccatcctggccaacagagtgagacactgtctcaaaaaaaaaaaataaataaatcaaataaaacaaaatacaaggataaaaaaaaaaggcttcctgggtgggtgccaaatgggtatttaataaaactcatcatccatcccaaagtaggatagaaggagagttctaagtatttatcagaaactaacaagaaaatgttacccagtggaaagactagacttaaaatcaggaatgagatgaggaggcctgctagcatagcagttaccccagactgttttggaggctccagcaacgcaaagaaaacaagagaaagaaatgagatatggatctgggaatgaaatactgaaattctcaacctctactaatgaaaaataaaagccaatagaaacagtaagaaatcaataaagtagctggataccagctctgtagttttcttctacaccagtaatatagttaggaattacaatttttaaaaaagctcattcataatagctataacaacttttaaataagtccaggaagaaatccaacaaggaatgatgagcctgtctgaaaaaaaacaataaatgttatgaaaggtcataaaacagatttaaataaatggagtgcccacgttaccagctgggaagacgcatgatataaaaatgccatttccctccaaattagcaataaaaccattgcaattcccgttaccctccgtggtgagatgttttgggtgaacttaaatttattcaacataattatttacttattttggaaaagtaatgattcaaaatgcaagagctctacaactaagaggaagttttcgtctcttttccccttcccccacccagccaccagggccctccgcagaggcaacgtagattcttgtggattctttttgtttttgttttcttcgagacagcgagacgcatcttgctctgtttcccaggctggaatgcaatggcagagtagcctcgaactcccagccttaagtgatcctcacacctcagcttcccaagtagctgggactacacacacaccaccaggcctggctaattttcatatatatatatatatatatatatatatatatatatttttttttttttttggtagaaacagggtcttactgtgttgcccaggctggtctccaattcctgggctcaagtgatcctcttgcttcggcctcccaaagtcctgggattacaggcataagccactgtgttcagcccttgtggagtcttttggagattttttgcatatctaagcaaagtcacaagggtgtgtgtgtatgtgtatctctctctctctctttaacttaaatggctgcatattatacccactgctcggttcctcgcttgctgtcccttagcaacacgtgctgcggatattccacctcaaaacaaaaagcacctcgggccaggtgcggaggctcacgcctgtagtgttgacactttgggaggctgaggctggcagatcgtttgagctcaggagttcaagaccagcctgggcaatgcggcaaaaccccatctctacaaaaaatacaaaaatgagaaattggccgggcatggtggcatgtgcctggagtcccagctacttggggggctgaggtgaacccaggaggttgaagctgcggtgagctatgattgtgcgactgcactccagcctgggtgacaaagtgacaccctgtctcagaaaacaacaagaacaacaacactttattctcaacaaattgattttaaagttcatttagaagactaaatgcacaaaaatatccaagacaattttgaaaaggaaggataatgaaagaaatatttaagaataataacaagtccttagccaggcctggtggctcacgcctgtaatcccagcactttgggaggccgaggcaagcggatcacaaggtcaggagatcgagaccatcctggctaacatggtgaaaccccatctctactaaaaaaaaaaatacaattactcgggcgtggtggcgggcacctgtggtcccagctactcaggagactgaggcagaagaatggcgtgaacccgggacgcagagcttgcagtgagccgagatcaccactgcactccagcctgggcgacagagtgagactctgtctcaaaaaaaaaaaaaagaagaatagcaagtcctcaaagagaacttagaggaaattactttggaatttagctactgcaagctatattaatgcacaggttgctttttttttgagacagagtctcactttgtcacccaggctgtagtgcagtggcatgatcctcccacctcagcctcctgagtagttgggattacggacgtgcaccaacacatcctgttaatttttgtattttgagtagagacagggtttcaccatgttggctagactggtcttgaactcctggcctcaagtgatccgcccacctcggcctctcaaagtgctggggttacaggcgtgagccaccacacccagccaaaatggctttgcaagtttaagctgtatccttcgagcacacctggctccaggatgatatgcgtccagcagccttttggcctgtaattcagttttctgtttggatccagccactgaaagggagtgctctgtgcagtgagcaagcaagtactgacccacgtgtagctccctcaataaatttgcactccagctttagaaatccatctcatggccgggcgcggtggctcatgcctgtaatcccagcactttgggaggccaaggtgggtggatcaggaggttaggagatggagattatcctggctaacatggtgaaaccccgtctctactaaaaatacaaaaaattagccgggcgtggtggcgggcgcctgtagtcccagctactcgggaggctgaggcaggagaatggcgtgaaccctgggggcggagcttgcagtgagtcgagatcgcgccactgcactccagcctgggcgacagagcgagatttcgtctcaaaaaaaaaaaaagaaatccatctcatgcaagttttgttaaaggaatcagttcctcgggccttggcctcctctgagagcactgacataaatctgtcacttaacttgggacaggatggaagctgctgcctcttctagcctcgtcctctctggcctgcactgctgtgcagcggtgtcagtgcaggggcatctgtggagctcagcctgccctggatgttctcgtctcctcccaggggacttaagactccacctaaggttgccagcctttcagtggtaagacatctatgcaatcaacccgaagccttaccacctggcactacttcagtgtatccttagactaccaggaggatctctgagacttggtggggaatggaacagcttgctgcaatttgtggatgtagattccgtatatttttgtctcttccaagagactgtaaactctttgctgacaaagtctgtgtcttgatagtttaaaagcagtttcccagtcttacccaaaaatggcaggaagggtgcccagaacggctgttccctgcttcctcctgggtctctgcatgggggacgctgggacagcctccccactcactctctctctctttctcccccgccgcgccccgcagtggcggctctgcagactgagatggagaacttggccctgcatctcttctacatgcagaacatcgaccaggacatgcgtgacgacatccgcgtgatgacacaagtggtaaagaaggccgagacggagaggatccgggcagaaatcgagaagaaaaagcaggtattctgcaaactcgacacatgtttaatgatcaccagaccgtggagcttcaaaaaggggctcagctttgcctcctgcgtgaaggcttccggccggaggggtggcggccggcctgggtggcgtcaacttgtatcaagggttggtggagaacaggccctcagccacgggcacctcctgacggggctgcttctcatcctgtttcccaggacctgtatgtggaccagctcaccactcgagcccagcaactggaagaagacattgccctgtttgaggctcagtacttggcccaagctgaggacacccggattttaaggaaagcagtgagtgaggtaaaagcagtccccgcagctctcagtgttcgaccctccagtgagtgtccacgcacagggtgctggtgggtctactagactgcacctgcccgtctgctggatgagtgactgcagccagcttacatctgcaaacatcgggccctccccatggtggggccacagtagatactgacaggtggacagcccggattcctattccttccctggctagtgggtgacagaaggcctcgcagggttcaggtactctagtcgcttcatgaccgccaaggccagcttgctgcggggatgctcagcaagttccttagcctgcagggacctcttccggggaggactgaagtctttctaacaattctcacccccgtgggcagccggccttccgggtagctcctacatctctgcacctcgtggagtagggagtggagggaacgaagggggtgaaagctgctccctcttggccccagattcaggtctgtagtggtagcaccagaaaccaaagttactgcaacttaaaaaaaaaaaaaaaaaaactatgagtcaccatcttcattcacgggtgcgggaatgacacggaggaaacaattaactttttttttttttgagacagagtctcgctctgtcgcccaggctggagtgcagtggcacaatctcagctcactgcaacctccgcctcccagattcaagcaattctcctgcctcagcctccagagtggctgggactacaggcgcccacctccatgcccagctaatttttgtatttttagtaaaaacagggtttcaccatgttggccaggttggtctcaaactcctgacctcaggtgatccacccacctcggcctcccaaagtcctgggattacagtcatgagccaccgtgcccagccaatgaaaaagaaggaagaggacttgaaggaacggatgagcacgctgggctcccagggtaaagggagggcccggggctgggcgttactcagcactggtctctccagctacaaatgcaattaaagtagagcacgtcccaatcagaatctcaggaacaaacaatcccttagttaacaaaacaattctggagttttatctgaaaaataaattaggaaggctagccaagaatggttttggaagagaagattcaaacggggcaagcagccatcccagtctgctcaggactgaggggtccccaagacaagggactttccatgctaagcccagggggtcctggacacagcaggatggcagatcaccctagcatcgccgcaccaaatattaaagtatacagtaaagctctggccaggcaaggtggtgcacacctgtaatcccagcacttggggaggctgaggcaagaggatggcttgagcccagaagttcaagaccagactgggcaacatggtgagaccctgtctccacaaaaaaataataattaaaaaaaaataaaacattagcccaccatggtggtgtgcacctgtggtcccagctactcaggaggctgaggcaggaggatcacttaagcccgggaggtcaaaaaaaaaaaaagaacaacaacactttattctcaacgaattgattttaaagttcacttagaagactaaatgctcaagaatacccaagaaaattttgaaaaggaaggatcatgaaagatccttgaactatgaaagatccaatgaaatatgatcataccactgcactccagcctgggctacggagcaagaccctgtctaaaataaaacaaaaccgtaaagttctagaggctaaaataatgtgtcacaagatagacaggcaagacattgaagcctatgagagagccccaaagcaagccagagtttatataaaaacctagtagattataaattaccagagagctaatgaattatgcatccaatgatgtcgggacatttggttaatcatttgggaaaaaattaaatcttttcctcataccagacactaaaataaattccagatggaatcaagtatttaaatgggggaaaatgtgccagacgaaaacaaatgaaaatatttatataatcctgggctggggaggcctttcaaagtataacaccaaaagcaggaaccttaaaggaaaagactaggaggggccgggtaaggtggctcacgcctgtaatcccagcactttgggaggccgaggccgctggatcacctgaggtcaggagttcgagaccagcctggcccgcatggcaaaaccccatctctactgaaaatacaaaaattagctgggcgtggtggtacacgcctgtaatgccagctacttgggaggctgaggcaggagaatcgcttgaacccaggaggcagaagttgcagtgagccgagatcatgccattgcatttcagcctgggcgacagagccagaatccatctcaaaaaacaaaacaaaacaaaagactaggaggacaatcacaccctcaataaaacctttgtagattaaggacgccacaaaccagatgaaggcggggagacaggcaggagaagacaactcgcagccattagtaaatccggggttgtgaagagaggctgaaagccaaggagactcgccctgtgtgcttccacaccctggaggcaggtgggctacttggtagatgcttccttttgcacctcccgccctcccctcgatgcaacttccccagggaagggggccgcccgcacttccttcatttctcatttccagtacccagaacagtgcgggggcaacagcagggcccctgttcatcgagcgaagtcacaagtaaccaaaggacagggagtcccctacagagttggcaaagataaggagagatgagccctccctgctgtcggccatgaaaatacagattggcctttatctttatcaagatcttcatccagggcgatatgatcatatgcagccactccctccctaaccctaaccctaaccccgcaccctgttagtgcttagactccattccaaggaacctagcaaagacctatgcagataacatttttgtatgttaaaaatgataaagccaggcttggtggggtgcacctgtagtcccagctactcaggaggctgaagcaggaggagcacttgtgcccaggaagtcagggctgcagtgagctatgattgcaccactgcactccagcctgggtgacagagtgaaacccccgtctctaaagaaataaatacagtgaatagagactcatgggggagatgacgctcatcaccgtgttgtgtcatcagaaagaaagaccccaagaagaggacattagtgaaacccattttcatacacctgtgcatcagaatacactacaccaaaaagagctctactgacatggaaacctgtctcgatattaatttcttattttaattttttttaaattatactttaagttttagggtacacgtgcacgatgtgcaggtttgttacatatgtatacatgtgccatgctggtgtgctgcacccattaactcgtcatttagcattaggtatatctcctaatgctatctctcccccctccccccaccccacaacaggccccgttgtgtgacgttccccttcctgtgtccatgtgttctcattgttcaattcccacctatgagtgagaacatgcggtgtttgggtttttgtccttgcaatagtttgctgagaatgatggtagagactaagtctcactctgtcccccaggctggagtgcactggggccctcatggctcactgtagcctcaaacttctgggtccaagcaatcctcccacctcagcctctcaagtaggtaggactataagcacatgccaccacaccgtgctaatttttttattatgattattctttttgtagagacggtgtttctttttgttgcccagactggttgggaactcctggcctcaagtaatccccccgcctcagcctcccaaagtgctgggattacgggcatgagccaccgcacctggcacaatacattaatttttaatatggcggggcatggtggctcacacctgtaatcccagcactttgtgagaccgaggtcggcagatcacctgagggtcaggagttcgagaccagcctggccaacatggtgaaaccccgtctctactaaaaattcaaaaattagccaggcgtggtggcgagtgcctataatcgcagctgttcgggagactgagacaggagaattgcttgaactcaggaggcggaaattgcagtgagccaagatcgtgccattttgctccagcctgggtgacgagagtaaaagtgtctcaaaaaaaaaaattaataggagattatgaaacaatatatagaatttgatttcgcacacacacacaatcacaggtgtaagaagttagaaatggttatctctaagtgttagggttattgaattttcattttctttttgcttatttgcacattctatttgcataggctgaacacttgcctttgtgaaaaactggggtctaaatgcacaggtgactgagcccggcagccatctttccatccttatgccttgacctgcacctcagtcaaccaggctgtggccggcagcctcaggggcaccatggggaggcctcgcacaggctcagtttaaggtgcatcctggctgaatttgggtccccacctgctgcctgggccagctcccactgcccaatggcacagagcagcctccttagtgaataacttacccccatacaaaactgtgacccagcagtcccacgactgggcatttatccaaaggaaagggaatccgtgcatccaatagacacctgcacccccatggccaggctggtctcggacccctgacctcaggtgatccgtccgccttgacctcccaaagtgctggggttacaggcatgagccgccgcacctggcccagtcaacaataatttattgtacattttcagatagctagaagagagggttttgaatgttcccaactcaaagaaataacaattgctggaggtgactgatacgctaattaccttgattcaagcagtacacattgtacatgtgtcgaaatatcactctgtaccccagagatatacagctgtaacatgtcagctaaaataaaaggaaatactacagacaaaagggaagtcagtcccgggatgtacacagtgtcccttcctaggctgcccaataatcctaagtaagcgtctgtgagaggaaaaaaaagtccccctcatcgtggtatacttaattcacaccattttaggttacgtcgtaatgaatagatggttcagaaaccctcacagccaagcatggtgtctccagggcgatggcctctctcatgcccggcgctgccctcggctcccccgtgatgttctagcgcactgtggttcagtcactgtctaccaagcttgcctgggtgtcacggcgtgcaggcacttctgggacttggcgttctacaggacgccccagttggctgactcgggccgccagcttgctcaagtcacagtgcttgcattggggatgactcatcaagaatcccaaacaccactcaaaacaagaccgcgatccaggccgtgctgggcatgcaggcatcaactcacttgacccggcagccccggggtcgctcctgtacccatggaggtgccgctcctgtacccatgtcacagctggggacactgaggcacagcgggtgagattcagcccaggcagccgtaccagccttaacctctgtgccccaagcataaaggaactcccctttcccttggagtaaattcctgaaccacccccctagttttcaagcccctcccctgcatgggccaagcccttactgcaggtggcccctcactgccccccacgatgcccctagacttccagcctccgctcagcctgcctgacctgcccacccctggctgtccagttgtgcctcctcattcccagtctaggcagccctgcttcccccagctggacgagagcatccagccctggccattcttgagacaaacacctccttccatcatggcctccctacaggaagcggtgctgggcccgtcctgtgggacctcagtccgaatcaatgacaccaccaaccctgcagaggtgtttcacggatgctggccaggatcccctcctcctctccctcctcctctccctcttcctctccgtcttccccctccccctcctccctctccccctcctccctctttcatctcctccccctccctctccccctcctccctctttcatctcctccccctccctctcccccttctccctccttcatcttccccctcctccctctcctcccctctccctccttcatcttccccctcctccctcccccttcctccctctcctcccttccctcctcctcctcattcccaagcactgagcaccgcaggccctgagcaaaggctcaaagcgggtacgggttatcttgaaagctacattcaggctcgtgtttacccctctgcagatgcatgatcaaggaaagtaccggtgatagaaggaaaagaggaagatttgggaatgtgaggctctggtgttcttgggctttgctcgcaaatgaaatgagacagccattcctgccccctcccctgttggctgcaggcctgcaccgagatcgacgccatcagcgtggagaagaggcgcatcatgcagcaatgggccagcagcctggtgggcatgaagcaccgcgacgaggcgcacagggcggtgctggaggcgctcaggtactgcagggccacaggcagcgaggatgtgcgggaaccccaggggtccgtggcaggcccgccccacaccccctctctctgggtccaccggatctctgggacagagggtgcaccttgatccccgggtccgggcttccgtccggaaagctccctcattgtttggtaagatttcagcgattcttaaatcctttccaacactgcggcgctgggaggggagaggcttttctgctcagatttcctggcaggattaagtagaaacagagcagggtaaagagaaagctatctttgggaggtaaaggtgtccctttgatttgcagtatcaccacctgagtgcggaaaccccatcccttctcgattgttctgcctgagggctgcattccaaccgaaatcctattttaatctccaaaggaaggggaggaagaggcctcctctgggcatcccctcacttctggggatggatgcgtggctcagggcagggcgttggagacacaggtgctgccttcattcctaaaaccacccagggtgaccaggtctcgggacgcggaaagaaaaagccgggcactgtggtggcacgtgtctcacccgctgagctttaacttcccctccacctttcgtagtctccaccccttgtgcccagcacagagcctggcatacagcaagcgctcaagaaaggctggaccaaggaatgagggtctggctggccccacagcacccgcagccaggcagccagcagcagtcacacaaccaggagatgcttttccttttgggtgctgtgattaaagaaacaaaatgaaaccattttgtttttaaaagtttttagaccaaaacattttcaaatgaataatattggattaaccatactcatttctggccaggcgcagtggctcgcacctgtaatcccaacattttgggaggctgagacgggtgggtcacgaggccaggagttcaagaccagcctggccaagatggtgaaaccccgtctctactaaaaatacaaaaattagccaggcatggtgtgggcgcctgtaatccccgctactcgggagggtgagacagagaactgcttgaattgcggaggttgtagtgagccgagatcacgccactgcactctagcctgggagacagagcaagactctgtctcaaaaaaaataaaaataataataatactcatttccttcactcccttgagtcaacaacataaagccaaagggaacactgtggtttgatacaggcgatgtttggctgaagcttcgtttcccctgtaaagatgcaggtcgaggaaccagagccagctgtggccgggcaagggctcctctccctgtgtcaccagggttgcctgaacaccaggacgagaggacttggccatctgcccacttgggtgtctttttcctcctgccccaatgctaggacttgatacctgactgtttaattacacggctcagctgccacgggccttaagaaaagtcaaggccaggttctctctgagggtccagcacctggcctggctctccgaggctcatggcctgtgaaccctgcagcgtccccaagggaagacgtcacctccgagatggtcctgttgtccagctctcccctgcatcccagactaaccagtgtcctctctgcaaaccgtcctcattgccctcagagacatggcttccttttggttgcaaacattgtaaaaatcgtattcgatcaggtctcctcctcctcggcccgcagtcactagaaccccctcccaagacaagcaaaggcacctggttttctgggatcccctgcctaacttgtgtgcaattgcaagaaagcatatgcgttcacccggagtcttccttccctctcttgctccgtgggagcacaccacactcactgttctgcacctctttgctttttccatttaacagcgtgtccctagagcgcttcccaagtcaaaatataaacaccgctcgttcccgcctttctaccacatggcattccgctgggatacttctacggggaagcttcctgcccggggcatcgagggcgttcgcgtccgtctgttatggcggtgctgctgtagataaccggatccgcgaatgctaacgctcaccaggatgctatatagccttttttatattgcctatcaagcccggaatgtctgggtctagcgggtattgctaagtaggattgtgacagtcacgcccccggcagcggtgtttcaaagtcccctgacagctcagcatgttgtcacacttcaggactgtgccaatccgattgatgaagaaaatagataatcttgttttataaaacgtgcatgcgcagaatgttgagtgaatattttagtggactatgtacacgcacaaacacttcacaacgagtgagagagcctctgacttcacctgcagcttgccacaccaaggccccggggaggagtgaggcccaacttttatttattatatttttgtggttcttgcaatggagtctcgctctgtcccccaggctggagtgcagtggcaccatctctgctcactgcgacctccgcctcctgggttcaagcgattctcctgcctcagcctcccaagtagctgggattacaggcgtgcaccaccacgcctggctaatttttgtatttttagtagagacggggtttcaccatgtgggccaggctgatcttgaacccctacctcaggtgatccacccgtcttggcctcccaaagtgctgggattacaggcgggagccactgcgcccggccagtcttttaaaagtgcaggccgtgtagaacattgtgagaagtataaactgtaattacagagatttgctgtttgcacccagatagatttgaagaagcaacttggagacaggtttaatagatcagggccattattacagaaataaattattgcatagcttaggacttccaagctaggagtgcagtgactgaactatacctcaaatattgaccttgagatgttcagatttgtagagcatcttagaaaatggtgacattcctggctgatggtcaggatggtgcataccaggccggtaccctggtggctgtctgggcatttctggagccttcaccctgcgagatccccatggggcaggaccccctggcccagaagcttggttttgccatcacaccgagaaggcacacttgtcctggagttagtttacatgaatcgagctcaccagagcctgacgtgtaactgagtataatagcccatttatgtgcatgatgaaatataaacaccaaagaaccgaatgctccacgctcggactagcagattcttatctgtgggggaggacacaggagcggatgacacagacccctgctcagggaccggctagagggcggaatgcctgggccccggccctgtctgcttcctgcttcttccccgaagttcatggcctgtccgtccacatgggcgggaggtgtcccgcgagcagccctcaccctgaccttggctgctttctccattccattccccacccctcctccctcctgacacccatggcattttttcagataagttaatacctttgattaggttccagccaaacctcaccctttctctttccccatgcctttgtgtctctcttcgtctgatgtcgagtctacaacctaatgctttgaagacagactgacttccccgtccttggtcagggggttgctgctgcgtggggggggcggtaaccataatcttgcccccgtgtctcatacacaagctgcaagcttagctcagaagctgtgcctgtcttggctgctttttcttgctgtcttccctatttttgcaggagttttgcacacggtcataaaagttcaggagaaacatgaaacgtgttattctgtttcctgtttaagtcgacctgaggaagctgaaggggtcaggcgcggtggctcacgcctgtaatcccagctctttgggaggccgaggcgggcagatcacgagctcaggagctggagattgaaaccatcttggctaacatggtgaaaccccgtctctactaaaaatacaaaaaaacagccagacctggtggcgggcacctgtggtcccagctactcaggaggctgaggcaggagaatcgcctgaacccgggaggtggaggtggcggtgaagcaagatggtgccactgcactccagcctgggtgacagagcgagacttcgtctcaaaaaaataagaaagaaaaagaaaaaaaagagagagagagagacagagagagagagagaaaaaaagaaagaaagaaaagaaaagaaaactgagggcttgccctaatctcctagacttccttttccctcagtcctgatgatggcagagacgactcctcaaaggctcttccccttggcatggagtgctggagcctgccctagggagggaggacaggatggagcaagacactgaacgcagaattagagctaggcaacgagcgggtgatttcactgtttcctgggtaacaagccccaggctcagctcggtctggtgtagcccctcaaaggggacactgtccttgcccccagttgatggaggaggaaggagcggaaggcagtgtgggatgggttgggtgtgggcattgccacagtgtccccagcaggcctccttctagcctggggatctggcaggtgggtcccagtcaccaccaatgccccatatacccaaggacactggtgacccagcagacctgaggccacagaccaaagacagagtaacaaccccattaaaaatgtgcccccatgggcgggcatagtggctcctgcctgtaatcacagtgctttgggagactgaggcaagaggatcccttaagcccaggagttcaagaccagcccgggcaacatagtaaagtaagaccttgtctctaaaataaaatataaaaaatagccaggtgtggtggtgtgtgcctgtggtctcatctacttgggaggcagaagcaggatgatcacttgagtccaggaatttgaggctgcagtgaactgtgattgcacgaatgcactccagcctgggcaacagagcaagaccctgtctctcaaaaaatttttaattagcggggcatggtggtgtgcacctgtagacctgtagtcccacctactcgggaggctgggtgggaggattgcttgagcccaggaggtcgaggctgcagtgagccgagatggtgccactgcactccagcctgggcaacagagccagagcctgtctcaaaaaaataaaaaagtgtccccagacacaggggcatgggtgaggcctgtcaggactgctgtggtagctcatggtgtcctgtcccttcttcccaccagggaatgaccgtggctgtgggcacaccccctgtccatctgggcctgcctgtgggagctggacactgccctccccagcagccagaagtcctgaaggaaccgtgtgtgaccctcaagaccagaccgggcctgccacaccaacccttcaaagaccgcagcggtccaggcaatccaacgtgggtcccaaagctaggtgaataaccacgaggagcccacggtcagccccttcccatcacatacgcagggaaatgggtcactttcactttcagaaaacaaagcctggaccgcacttaacttggaggcagataacctaatcagaattcacacacgcctgggacttggagccaaaagcacccgtgctcttacctgcctttgtcctatttcctggcgggaaatacagagggcagacaggtcttggcccgcagccacagcccctttaccccaagatgtgactcggtcagccacacggcctcacagcctcctcccaggccctcagctgtggccacggcagccaggcaggccgacccaaggacaaaagccacgggcagtgtcctgggagagaacccggccttgaccacaggctgctggacacctcctgtgtcccccccttaatcctcagaggcacggtgcccaatgcctgggccatattccagattccatccgttctttttgtttcatttacagacagtccccgacgtcacgatttttggactttaccatggtattaaagcaacaggcaggcaacagaaactgggctttgagtcccacacaacctccctggttttcagcacggtattcaataaattacatggatgccccacactttattatcaaacaggcttcgtgtgagatgattttgcccacctgtaggctcatgggagtgtcctgagcacgtttgagggaggctgggctgagccggggtgcctggcaggaaatctgcaggaagtgcattttgggtttttcagcttttttttttttttttttttttgagatgaagtttcactcttgtcgcccaggctggagtgcaatggtgcgatctcagctcactgcaacctccacctcctgggttcaagtgattctcctgcctcagcctctcaggtagctgggattacagacatgcaccaccaccatgcccggctgattttgtatttttaaaagagacggggtttcaccatgttggccaggctggtcttgaactcctggcctcaggtgatctgcccccacttggcctctgaaagtgctgggaattacaggcgtgagccacggcaccagcctgcattttggacttaggatattttcaacttacgatgggtttgccgggctgcatccccaccgtaagctgaggagaacctgtactttctattggtgcctgctgatctacggagtttttaaagtacgatttaaaaaaataataatccttatcaaggataagtgattgcgttacaggacatttgaaaaacagagaaaaggatttaaaaataccatcgactttctctttttgtgacaagaagactcattagcatgtcagcacactctcaggcacacatttccccgagtgttaggagttctgttgcacagtttgtaactgtatctttttaaattgggcatcttatttttattgtcaaatttagacatttataaggctgctccttcctaaaaaaagaaaatgagtaacttatttacttgaagtcaggatgactggggataatttatgtacaaaattgcatacctccagccctggcaaccgctgtgccgccttctgtgcctatagctctgccatttctagaatgtcatataaatggaatcgcgcagtctgtagcttttcttgtctggcttcttccacttggcatcatgcttttgagacccacccatgttgcaagatcagtagtctgttcctttttattgttgaatagtattcccttgcacggatacatcagatgtatttgtccatccaccaactgatggacatttggcttttacctttggaataccgtgaagaaagctgctgtggctgtcctgaaaagatctttgcatggagacgtgtttccgtttctcccgggtaaatacaggcgcatctcgtttcagtgtgcctcgctttctcctactgcgtggaatcgcttttgtttgtttgtttgtttgtttgtttgtttgtttttgagatgagtttcactctgtcacccaggctggagtgcagtggggcgatcttggctcactgcaacctccacctcccgggttcaagcaattctcctgcttcagcctccagagtagctgggattacaggcacatgccaccatgccctgctaattttttgtattttttagtagagacggggtttcactgtgttagccaggatgatctcgatctcctgacctcatgatccacccgcctcagcctcccaaagtgctgggattacaggaatcgcattttttacaaattgaaggttgacggcagctccgtgtggagcaagtccaccggcaccatctctccagcggtgcgtgctcacttcctgcctctgcaccacatgttggtcgttctcataatatttcaaactttttcattgtcatcgtccgttatggtgatctgtgatgagtgacctttgatgttaactattgtaattggtttttggcaaagccacgaactgcccttgtttaagacagcaaactgaatcaagacatgtcgtgtgtgtactgactgctcgccggctggcgttcttccatttctgtccctctccttgggcctccctattctccaagactcaacagtattgaaattaggcctacaatggccactaagtgctcaagtgaaaggaagagtctcatgcctctcactttatttttattttatttatttatttttgagacactctgtcccccaggctggagggcagtggcacgatcttggctcattgcaacctctacctcccgggttcaagcgattctcctgccccagcctcccgagtggctgagattgcaggtgcctgccaccgtgcccggctaatttttgtatgttagtagagacagggtttcaccatgttggtctcgaactcctgacgtcaaatgatctgcctgcctcggcctcccaaagtgccgggattacaagtgtgagccaacgctcctggccgcctctcactttaaatcaaaagttagaaatgattaagcttcatgaggaaggcatgtcaaaagctgagataagccaaaagctaggcctcttgcaccaaagggatagccaagttgtgaacacaaaggaaaagtttttgaagaaaatttaaagtgctgctctaatgaacacacaaaagaaagggaagcagcctaattgcgcgtctggagaaagttcaggtggtatggacagaagatcaaaccttccggccgggcgcggtggctcacgcctgtaatcccagcactttggaaggcccaggcaggcggatcacgaggtcaggagatcaagaccatcctggctaacacggtgaaaccccgtctctactaaaaatacaaaaagttatccaggcatggcggcaggtgctgaggcaggagaatcacttgaacccaggaggcggaggttgcagtgagccgagatcgcgccactgcactccagcctgggcaacagagcgagactctgtctcaaaaaagagaatgcacctggtgggcatgctagctcaagtaatctcagcactttgggagggcaaggtgagagaattgcttgaggccaggagttctagaccagcctgggcaacatagcaagagcctgtctctaaaaccgaaaaaaggaaagaaagaaaatgtacctggtcacccaagagttttgatggagctggagctgtgcaagatgaatgttgtttccacacctgtaacacagcatttattctgcaacccatgggttgaggagtaatttcaactttcaagtcttactattgcagtaatacagtctgtaaagctatagctgtcatagatagtgattactctgatggatctgagcaaagtaagttgaaaaccttctggaacagactcaccattctagataacgttaaggatattcgtgattcatgagaggaggtcaaaatattactcttggtttttttgaggtggagtcttgctctgttgcccgggctggagtgctatggtacgatcttggctcactgcagcctctgcctcccggattccagtaattctcttgcctcagacttctgagtagctaggattacaggtccttaccaccacacctggctaattttttatatttttagtagagatggggtttcaaccgtgttggccaggctggtcttgaactcctaacctcaagtgatatgctcacctcagcctcccaaagtgctgggattacaggcatgagccacctcagcctcccaaagtgctgggattacaggcatgagccaccgtgcctggcccaaaatattactttttttttttttttttttgaggtggagcttctcttttgtcgcccaggctggagtgcagtggcacgatctcagctcactgaaaactccacctcccaggttcaagcaattctcctgccttagtctcccaagtggctaagattagaggcacctgccactacgcccaactaattttatttttttaaggttggaattgcttttattggggacagatgtgcaagtccccgctcatggtcaggttagtgttctgcccttgcagaggtgccagcagcctgacacctccatctgccgcccgccccgggttagtggaacatgcaaagctcagagggtggaggcaggggtggtcgctgctgaagccagacgtccagctaatttttgtatttttagtagagacgggttttcaccatgttagctaggctggtctcgaactcctgacctcaggtgatctgcctgcctcggcctcccaaagtgctgagattacaggcctgagccactgcgcccggccccaaaatatcacctttaatggcaaaactgcaattacttttgcaccaacctaatatcaacattaacagaagttgattgtaacgcctgtggatggctttgagggctcaggacttcagcgcagaaagtcactcccgatgtggtggaaacaagaactagaatgagaagtggagctgagatgggatggaattgctgtgttcatatgatcaaactttaatggatgaggagttgcttcttacggatgagcgttttcttgaggtggaatctgctcctgtgaagatgccatgcgcattgttgaaattaacaaagaatttagaatattccataaacttggttgatgaggcagcagcagggtttgagaggactgactccaattttgcaagaaggtcttgcgtgggtaaaatcctatcaaacagcatcacatactacagagaaatctttcataaaagaagagtcgatccatgtggcaatggatgtggcaggaagagtcaatccattgtcttattttaagattgccgtccaggtggggtgactcacacctgtaatcccaacactttgggaggccaaggcaggcagatgacctgagctcaggagtttgagaccagcctgggcaacatggtgagacctcatttctacaaaaaatacaaaaattagccaggtgtggtggtgtgcacttgtagtcccaggtactcgagaggctgagggaggtggtggcttgagcctaggaggctgaatttgcaataagccaagatcacaccactgcactccggcctgggtgacagagccagagtcagagcctgtctcaaaaaaaaaaaaaaaaaattgccacagccaccccagccttcagcaaccaccaccctcatcagtcagcagccagcaacatcaatgcaagaccctctaccagcatactttatcaagtatgacttgataaacacttaggtgattgttagcattttttagcaataaagtttgttttttttttcttttttaaaatagagtctcattccattacccaggctggagtgcagtggtgtgatctcagctcattgcaacctctgcctcttgggttcaagggattctcctatctcagcctcctcagtagctgggattacaggtgcccaccacgacacctggtatttttagtagaaatagggtttcaccatgttggccaggctggtctcgaatttctgacctcaggtaatctgcctgcctcagcctctctaagtgctgggattacaggtgtggaccaccacgcccagcctaaagtaagtacattctttagacatgatgctattgcacgcttgatagactacagtaaagtatgcaccttctgtatgcactggggaaccaaaaaagattgtgtgacttgctttactgtgatacttgcttaattgcggtggcctgcaactgaacctgcagtatctccaaggttccggctcaacatacattttactttataacaaatgcttgccggccgtggtggctcacacctgtaatcccagcactttgggaggctgaggcggatcacttgagctcaagagtttgagaccagcctgggcagcatggcaaaaccccatctctacccaaaaataccaaaaattagctgggtatggtggtgcatgcctgtaatcccagctacttgggtggctgaggcaggagaatcccttgagcctggtaggtggaggttgcagtgagccgagattgcgccattgcactccagcctgggtgacagagcgagactccgtctcaaaaataaacaataaaacagctgctgcggtgttttcccaagtgactggttccaatttgcattttctccagcaatttatgagagtcccagttgttccacatcctcgccaacatttggtattatcagtcatctaattttagccatcaaatatagccattagcaaatgtgtggtgcatcgccttgcggtctgagcctgcgtgtccctaatgactagcgatggtgagcatctcttccccggcttattcgctattcctgtgccttctctggtgaagcaacttctgctcatttttccgctgagtggcttatcattgagttgtaagagttcttcatatcttctggagacatcttttatcagacgtgtgctttgaaaatatttttgtcccagtctgtggctttgtcttttttacctctttacagtgtcttttgaagagcaaaagttttaaatttttgtgaagtccaacttattaaatattttctttcctgattcatgctttttatgtcttctctaagaaatctctaagggtcaggccgggcacagtgtggctcatgcctctaatcccagcactttgggaggccaaggtgggcggatcacgaggtcaggagattgagaccatcctggctaacacggtgaaaccccatctctactaaaaatacaaaaaattagccgggcgtggtggcgggcgcctgtagtcccagctacttgggagggtgaggcaggagaatggcatgaacctgggaggcggagcttgcagggagccaagatcacgccactgcactccagcctgggcaacagagcgagactctgtctcaaaaaaaaaaaaaaaaaaaggaaagaaaaagaaatgtctaagggtcacgaagattttctcccaagttttccactaaagttttccaggtctcgcttttaggcatctggtccatttcaagttcacgtttgttgtggtatgagcggggtccaggctcaggttttgtgtgtctctctctagttgtcccagcaccacttgttgaaaagactgtcctttccgtattgaaatcctgtgacacctttgtcaaagatcaatgtattgtgtgtgtgtgtctgtttccagactctctattctgttccgttgatctttttgtcattctttcaccaataccacattgtctttctaactagagctttatggaaaatcttgaaatcagatagtctgagtctttgatgttgttttacaaaattattttggttactctaggtcctttaggtttccatttaaattttaaaacttgcttgtcaatttctggggaaaaaatgccttctgggatgtaactgaaattacattgaatccatagatcagtttgaagagaattgaggccttaataatattaaatcttctgcttcatggacatggcaaatctctccagtatcagtatctttttttttttttttttttgagtcagagtcttgctctatcacctgggctggagtgcagcggaacaatctcagcttactgcaacatccgcctcctgggttcaagtgattctcatgcctcagtgtaccaagtagctgtgaacacagccacacaccaccacgcccggctaattttttttgtatttttagtagagatggggttttgtcatgtgggccaggcttcctttctctattgatagtgtcttatcctttgaataagtttttattcaaatagtcagaaagtactttcttcttggactagaataataccttccatatttttctcacatctctccccagtctttcaattctctttcccaagcaacctgttactgtttcataaaggtctttccagatagatttcgttcatacatatgcattattctcgggtgtttatctctccacttaaaaatcacccgcggccgcttagtgtgtcccgctctgcagcttggtgtttcttgtgctgtgtcttagagttattccatgtcagaacacatagaaatcaccgttgttctttgcagttctcttcacactgtgttctaaatgatgcctgtgccataatttaatcatcctcatcgatccataatgaggccctttcctgttttttggctttttctgatctcatcagtggatcaataaatatccacacacattaaaaatagatactggatcaccaggcacggtggctcatgcctgtaatcccatcactttgggaagctgaggcaggtggatcacttgaggtcaggagttcgagaccagcctggccaacagggcgaaaccctgtctctactaaaaatacaaaaaaaaaaaaaaataggcaggcatggtggcacacgcctgtggtcccagctactcaggcagctgaggcatgagaatcgcttgaacccaggaggttgcagtcagccgagatcgcgccactgtactccagcctgagtggcagagcgagactctgtctcaaaaaaaaaaatactggatggccaggcgcagtggcccacacctgtaattccaacactttgggaggccgaggcaggtggatcacttgaggtcaggagttcaagaccagcctggccaacatggtgaaaccccatctctacaaaaatacaaaaattagctgggcatggtggcacacacctgtaatcccagctacttgagtggcttgaggctgcagtgagctgagatcatgccattgcactctagcctgggtaacagagtgagagactgtctcaaaaaaaaaaaaagaaagaaaggaatgaaaggaatgtttaaagtaccgcagaacatctcagaataataggaaaacatgcctcacacacacaaaattcaaatcctcatgctgaggcgtaagaatgacttgaacccaggaggcagaggttgcagtgaggcaagatcgtgcctctgcactccaacaaatacaggatttgaatctgattatttcatttgaatcagtattttagatctgattatccgatatctgtgttttagagcttgacgttaattacaggtatctcatcgcagcatgccgaggggaaagacaatagaatttgaagtgggcccactggtgttccctcagccacgctgtttcctgcagaccttgggctagtgattgaaatgctctgagtctcaatggccacatctgtaaagctggactatttccttcctaggattattgtcatggttaaggaaggtgggcagatgagaacccctagcccaacgtctgacccatgcgtcactttccttctccccataatcacagtacaaaagagttgtcaacttgggctttcaatagataatagttctcttgatctatttgaaaataatagtcaagatttggctattggctgcaaaaatacagtgagggagaaggaacaaggcccagtgttcaatagcatgtcacagtgactacagttcacggtaagttagtgtatatttctgaatagctagaggaaaagatttggaatgttctcaacacgaaggaaggatcatgtgtgaggtgatagatggccggttcccctgatttgatcatgacatgctgtatgcttgtgtcaaaatatcgcatgtacctctcaaatatgtgccaatctatccataaaaattttttaaagatttggctgctattaaaagagttggtttcctgctgggtgcagcggctcacacctgtaatcccagcactttgggaggccaaggcaggcacattgcttgagctcaggagttggagaccagcctgggcaacacggtgaaaccccatctctacaaatagagtttaaaaattagccgggcatggtggcgcacacctgtaatcccagccactcaagaggttgaggcatgagactcgcttgaacccggcaggcggaggttgcagtgaaccgagatcgcaccactgtatttcagcctgggttacagagtgagactctgtctcaaaaaataaataaataaataaataaataagagttggcttcctaatttatttctctgtgcattgagttcgccttagtgagctccctcgtgtggggcgcagctctgtgcactggctctctgatgtctcacacgtaactggctctccccgctgcatttctacagaggatgccagcatcaagccaaatccaccgacggcgagattgaggcctataagaaatccatcatgaaggaggaagaaaagaacgagaagctggcgagcatcctgaaccggacagagacggaagccacactgctgcagaagctcaccacccagtgcctgaccaagcaggtggccctgcagagccagttcaatacctacaggctcaccctgcaggacacagaggatgccctcagccaggaccagctggtgaggccgggcccgccccacaggtcacacctggcgcacggtggtgcctcttcaggcacgtgcaccctgtggctccttgtctccaggaacaaatgatactcacggaggagttgcaggccatccgccaagccatccagggcgagctggagctcaggaggaagacggatgctgccatccgggagaagctgcaggagcacatgacctccaacaagaccaccaaatacttcaaccagctcatcctgaggctgcagaaggagaagaccaacatggtaggcccctgccccagggaggggctgtgcgaagccccctgcagcctgggcatatgagggcaagccgtcctggaggcggagagggcggagtcagtgtgagcagagggccctcctgtgctcactcctttccatggtgttcaggttgtaagggtgatacatttttactgtagaaaacctagaaataggccaggcgtgagccaccgcatggccagctgccagccaaaggctgatttccctggggggacctggagtgtgacttcgacgtccatggcagggaacccccaattgtgagctcatgttcgcatcccctgggatcttgctttatcctttatcacctgtggtgggggtggaggggacttgtgtccttagaaaaaacaattccttacttgaattgttttttctttgcctcttcccgaggggtgaccgcctccccaacaccccgcctcaagcaggcccctttggaggacccccagaggctaccacaggctccaccatttccagagcacatcctagcagtggggcctgcccaacagtccccattttagtctcagaggagggtgacagattcccgatgccaagctctgccggttttgccctcctgaggggtgggaaaggagctggccaggcagagctgaagggcgtggtgggtgtgaaggagcccatccagccgtgctgctaccagccaagtccagttcccaatccccaggcccccgggcccccgccgagcccctgtctgggcagcccgataggtcatacgtgttttgctgccagtttccagaagagggcagcaaagagtcttggaccaacacattcgtctattacgacaattttccaaccgatgccagtccagctgctgaaaagagtacccccgacacgatgtttgaactgctcaaagcctcatgggctgatagaaggtggggtggggaggcatatctgggaggaggagcaaagtgtggatgggcgggaccacccatccggagctggggtcaaccacggggtccaggcagttaatccagggatggtgtagatgcctagggggagccagggtgggctccacagagaccacaaacagccaggagtggagcgggggtgcaggcccggctgtgacggggagggactgaaggggacttggagccatagcccctgcagggcagttggggaggggggaggcagggagtccttggggggcccagatctcagggtgaacttggcagaggaggaggctgcgagctgacattgccacacaactccagatgccggaagcttccactccaggtgggcagggtctgggttccaccacctggggacattgggtctcctgggaagccgcccgtggtggccagtgagagacatggagcccacaggcgtggcgggaggagaagctcagatggccctgaggaggctggggtaggcaggagccacagtcgtgagagagccaaggccttgtgtggcaggagccgacgggcaggggtgctcagggcagacacagggcccgaggccacctgttagaaccatgccctggggaagaggaccctgtcctggtggtgacagcatctccctgttcccagagcagctttggccacaccattgcagctgtgactgccactgcctcactcctgattatcacaaacgtcctctcgataaaccccccgttgccagaagggatccaaagtctgtctaatgcctccaaagagcccacagaggaggccagcactggcggctcagacctgccggacagcaggaggggtcagaacgcatggaggaaccagtgtctaacaattgcttcttgcttcataaactatgctgcaaatgtgatagagtacagcacagccattacagcttacagagcacaggaacataagacccgacttaccagattaaaaagcaggttagcacccagtgtgtagggtgtgatcctatttttattttggagaattatatagaaaagactgggaggaaaaatggattcagatgggaatggtagctaacttgtgtcagaattgcaggcaattgaatgtgttctctgtcctggcctgtattttcacatttcctcacaatgtgtgtgctacgatttaagaagtgtgttagtctgatctcacactgctgtaggaaatacctaagactggataactgataaaggaaagaggtttaattgactgacagttctgcatggctggggaggcctcaggaaacttacaatcatggcaaaaggcgaaacaggcacctccttcacaaggcagcaggagagagagtgtgtgtgaagcaggaaccgtcaaacacacaaaaccatcagatctcatgagaactcactatcatgagaacagcatgggggtagcggcccccatggtccagtcacctcccacaggggccctcccttgacatgtgggattatggggacacaattcaagatgagatgtgagtggggacacagccaaaccacatcaataagaaaagctaataccatgatctctcttttctgtaaaaagccaacatctgggttccaacaagtaggtcccttgctgggtcctggagacagtgggaaatccagcctcctgcactcgtgactgtgcgtttggaatatctccagaggaacatcccgaccgtcagggaacggtggatcagcaaactcgtcccgggccttgggtgggggcaatattcacaggtatttcttttcatcaattcagatgacacatctttccaaaatcaacggtgacattgcccagaccaccctggacatcacacacaccagcagcaggctggacgcacaccagaagaccctggtggagctggaccaggacgtgaagaaagtcaacgagctcatcaccaacagccagagcgagatctcccggcgcacgatcctgatcgagaggaagcaagggctcatcaacttcctcaacaagcagctggagcggatggtctccgagctgggggtgaggtcccaggcagggagacgtggtccccggctgactgtggtgcctggtggggcagagccccctcagatcccccacggtcagacatgaactcctggaaggcacagaactgcctctttccctacctgctttacagacaaaatggcacgtgtgccaagcgctctaagtcacatttttctgcacaaggccagagagtattccggctttgtggccagttggtctctctggcagtgacacggctctgcctccatagcgagaaggagcataggtaaaacgtaaaggaatgggcacggctgtgtccaatcagatgttattcaaggccactgaagtctgaattccaaataattttcacccagcacgaaatattctgctgctctaagaaaagtggcctaatgcgtttgaggcctgatgccatatacgtcatccaggtccctgtactctcaaagcccctttgggttccagaggccccacccaccctgccagcgcacccaccatggggaagctagagggggctccagagccccttagccatatttcctccagcggggtctgtggcttgcggccctgctgagagctaacttgagcccctcggccttcgtccagtttcatgacctcagggttccaggccctctgcagcccactcacaaagacctttgagcccaagaaggctaattttgctttttttttttttttttttttctgagacggagtcttgctctattgcccaggctggagtgcagtggtgccatcttgctcactgcacatctgcctcctgagttcaagcgattctcctgcctcagccttccaagtagctgggaccacaggtgtgcaccagcacacctggctaatttttgtattttgggtagagacggggtttcaccctgttggccaggctggtcttgaactcctgacctcgggtgatccacccgcctcagcctcccaaagtgctggaattacaggcgtgagtcactgcgcccagccctaattttgctttttgatgaatatccggtctagggggaagaagtggggcccctggagcttgaaatcaaaaggctgagcaagctgatcgacgagcacgatggcaaggcggtccaggcccaggtgacctggctgcgcctgcagcaggagatggtcaaggtgacacaggagcaggaggagcagctggcctccctggacgcatccaagaaggagctccacatcatggagcagaagaaactacgagtagaaagtaagagccgccgtgcccggccctgcagtgatgctgagacgagctctgggacgtgggcacctcccaggggaggggcactcagtggggcacgtcgctggatttgcacgcagccttaaaagcaaataacaaacgcgcatgctccctgtattttgtaaatgtgaaccactgcctgcccagctgcccagttcgcagtcacagcgggagggttgagaaatgtcacgaaatggctccaagctcacggacttcagagctctccttgagagaggagcatggaaggttatcatccccgccaagccagggcactcaggtggaaacactggcacgggaaaagccagggtcctgccaggcaggctcctggtgctgtccccacatcacctccagttgggcttagaaaaccattccaccggggctccccaacccttctgaggcccaaggggctgccaaagcaccagggtgcctggaatgatggaggcgggcatccttcctggaccactctccacccacatgtccacctgccgagacatcccgggtcctgcccggtcttgggtcggggatccatgctggtcaggcctgcagcagagcccccatgggaaatgctgcccagacacatcatgtgcccttctcggaggtcctgctgcctctcgccctgcccttcttgggttgcccaaacccgtctgttggtgagtagcaagtcccaaaagaccctatggagctgtcagctgagtatcggtgtcccaaggcaagagctgccgaaataccatgctgtgagatggggaggatcacccatggagagggcagagagaggggctcacatgcccatgtcctggggtagtcagggcacaccatggggacagcaggaggagctggagaagccctgtgaggagtggccagcggatgaaccagctgtggcctcttgtgccctccacccatcttaacatcaagaagagctgttgttttctgcccctacccctgagcttggctggggcagggcaggggtctaagggcctccctctcctggagactcacagtgtctgagcatcaaccaggtcccggtgctccacagatttgcaagtgtctgggggagggagcctggccctcccacacgccctgcccacacctgctggctgtccccacaggcaggtcctctcagttccgttggaggaccaggctttgggagcttagcagccaaaaagagaccccctgtcctctcctctcctctgtcctggcagggacgagattcaggcaggagcgccaggaacgacaagagggaggggatgaagggagctacagggagagacaaaacctggctcacctctcggacactgctgcctgcgggcgaggacccgtaccctcctggggtctctccctgagtctctgttttctgccataggcaagattgagcaggagaagaaggagcagaaggagatcgagcaccacatgaaggacctggacaacgacctgaagaagctcaacatgttgatgaataaaaaccggtgcagctcggaggagctggagcagaacaaccgggtgacagagaatgagttcgtgcgctcgctgaaggtccggccgtgtccacgcagtcccggggctcaggacgatggagggcgggggtacggtccttgcggtgggcgttctgcaccaggatgtaatttccacacccgttcaagatgcttgtaggggtattagaaatccagcctgcagccctgccctcggtgccgggatagagggcaccagccccggcatccacaatcccatggccctccccacagctgtcccgccccctcccccatgcaggcctctgagagggagaccatcaagatgcaggacaagctgaaccagctcagcgaggagaaggcgaccctcctgaatcaactggtggaagcagagtgagtcccagtctccagccacacgtgggtcatgaaggtcactgcacctacaggcctctgtccgttgaagaccatgtaggaggccaggtgtggcagctcacacccatatcccagtgctttggtcattttttgttgttgttttgttttttgttttgttttgttttgtttttagacagtcttgctctatcccacaggctggagtgcagccgtgcgatctcagctcactgcaacctctgcctcccagcttcaagtgattttcctgcctcaacctcctgagtagctgggattacaggtgcccgccaccatgcctcactaatttttgtatttttagtagagatggggtttcaccctgttggccaggctggtcttgaactcctgatctcaggtgatctgcccacctcagcctcccaaagcgctgggattacattcatgagccaccgtgcccagcaatcccagtgctttgggatgccaaggcaggaggctcctttggggccaggagttcaagacaagacggggcaacacagtgagaccccatatctacaaaaatgttttaaattggccaggcatggtggtgcatgccggtagtcccagctactcgggaggctgaggtgggaggatcgcttgagcccaggaggtcaaggctgcagtgagctaggattgcaccactgcactccagcctgggcgacagagcgagaccctgtctctaaaagaagaaaaagaccacctgggcatgggtctggaacccaccctagtggatcccagattccccacagagtctgtctaccccccttggtggcagttcttgagccaaacgagttactgctagaaattgaagggtttcctttgtgataaagtttttaagtatccattattttatggtgtctgattattaaagtaacacacacccagctctaaacattttaaactatacaatgcgtgcaaagtacccagggaaaattgcatataattccaacgcccttcacttcccagaaaaccaatgtgtagctatattcctttcttgttttgctctgttttttacacaaatgggattgtttcagaagttcccccttgaagcactttagtattttcatggccatctttccgtgtcacacacgtgggcccatatctccctgtggaaagggtgcggagcaggcgtggtgtggaggcaccgtcctttcttcagcgtgctccggaagggatgaatagcgcagggatcgcctgttccttgcggtttgatagaatctaggcaaaaaattatctgggaccaatgctttggggggcttgtatctttggtgacatttaaatagcttttagactattggtgtattcaggctttttactttttcttaagtcagcttctatcaattatactgactttctcagctcctacagttatatatccctgttctctctctctctgtctctctgtttcttccccacccccatctccctccctccccctgtatgccagaggttggcaaacgtttgcataaggagcccagtagtgaacacttcaggctttgagagcctcacgctttctgtcgcagctgcttggctctgccattgcagcttgagagccttgtaaagccttagagtgtgagctcaccgaagcatcagaagaaaactcctaatttcttacactgcctctcctacctctaaagacaccagattatgctttgggagaaaaaaatccaactggcaaaagagatgcgttcctcagtggattccgagatcggccagacggagatccgggccatgaagggcgagatccacaggatgaaggtgaggggaggagagcggcgtggcagggcctgctgggtgccagcccttgggctctggagacctggccacaccaaggcctcggctctcccggggctcctgtgggaaccacactggccacattggctggtggcaatgggtgagatttccagggagcgacccgctccagcagagtgacctgcactccagccgagcactggcaaagcgcacgtcccccttgacccagcttttaccacacgcttgcttttaatgtgcagaaatattgcagaacaacacaggacgcacacaggcacgtgcacgaacaacacgggacgcacgcaggcacgtgcacgaagaacacgggacgcgcgcaggcacgtgcacgaacaacacgggacgcgcgcgggcacgtgcacgaacaacacgggacgcgcgcaggcacgtgcacgaacaacacgggacgcgcgcaggcacgtgcacgaacaagggacgcgcgcaggcacgtgcacgaacacaggacacacacagcacgtgcatgaacaacacaggacacacacagcacgtgcatgaacaacacaggacacacacaagcacgtgcatgaacaacacaggacacacacaagcacgtgcatgtcatctcacaaaacgctgttttattcctactccatgtaatcacagcacgctggtatttttaaatgccggttgtaaccctcaaactttgtgaccctctaacgtatcccactgtgagacagtctcacaccacagaagggctcagagagcacccccatctcatccttcacagccgcgttgtctctccatggtcacaattagatttcattgcctttaaaaggctggtaattaaattgcaagtggtcatcaagctaaaggttcagggccttaaggataacagtaagagcagttcataaaataaatgggcctcactttcaccatgccatgctaaatagaaattcctctgctgagttatttttcagatcaagtgcatatgctaataagatgttgtgtttaaaaataccaaatttaattgacttttcatattacagaagccacatgtatttgctggagcaagacaagctctcctccacagagtgggggccaaagagaaggtccgggctgctcctccctgtcccttcttccccggctccccctcctcagccagggcgactgtgtcagccgctgcagggataaggcctctcaccttctcggatctcacacaaatgcacaggcagggcttgccttggccctacatggttactaacccattctttaacagttacaatatatactatggatatttcacaatttattgatccagtcccaggttggtgaaaattcaggttgtttccaatttgttgttggtgttattgttttgtcctagacacaatgtgtgttagggttctccaaagaaacagaaccagtagactacacacacacacacacacacacacacacacacacacacacagagagagagagagagaaagaaagagagatttactatgagaattggctcttatgattatgagggccgagaagtcctagtatccggcatctaatctgcagacccaggagagcccatgattcagtcaagtctaagacctgagaaggaggcaacggtgtcatcccagcccagtgttcccccacccccaccccgtcccaccaccttcttctgccttttctcctcaggccctcaacagattggatgatgtcacccagcctggcaagagggatctttactctgttcaaatgccaatcatttccagggacaccctcacagttctacccaaaacagaaatcatgtttttccagctatccaggcattccttagcccagttaggttaacccaaaatcagccatcacacagcattataatcacatccttccttactggttcttttttttttcttctagactatgttcccaaaggtgagattactaggtcaaagggtgtataaattctgactgtaacagcctgacagattacttgtctaaaaagcacatggcggcagtcatatctgtaccttcttctcagttctggtgttatttatctatctttttttttttttaattgaggtttttcagctgagtggaagctcacagcttagggcattcagccctataaggattttctgggtttttttgttttgttttgtctgtttgttttttgttttgtctttgagacagactctctgtcattcaggctggagtgaagtggtgggatctcggctcgctgcaacctccgcctcccaagttcaagcgattctcctgcttcagcttcccaagtagctgggattacaggtgtgtgccaccatgcctggctaatttttttgtattttcagtagagacggggtttcgccattttgcctaggctggtctcaaacttctgagctcaggcaattcgcccacctcagcctcccaaagtgctgggattacaggtgtgagccactgtgcccagccagccctacaagttttgatagagacgtacaatcatgtagccactgccacatcatgatatatttcctcatcctcgaattccctcatgccctctgtagtcagctcaccgcataccccagccgccatgacagccaccagtctctctccatgcctgtcgttttggcttttccagaatgtcacataaatggatcaaatagggtgagacatattgagcctgactttccttgcttagcctcatgcatttgagattcttctgtgtggtgaagcccaattacccagtctgttctctttttttagagacagggtttcgctctgtcacccgggctggagtgcagtggtgcaatcatggctcactgcagccttgaccttgtgggctcaaaggatcctcctgcctgggcctcccaaagtgctgggattacgggcacacaccacggcacccacccctcagtctgttctttcatggatcgtttcagtagcttatctgaggagcctctgcctagctgaaggtcacgaagagcttctcttctgttttcttctagaagcttcctgcttttaggttttacatttaggtccataatgtattttgagttaatttttgtgtatggtgcaagttgtggactggggttaattttttttgcatttggatgtccactggagtcagccctgcttgcttcctgaaaagactgcccttcctccaccgaactaccgtccagtccttgttgaaatcagctgacacgtttgtgtgggttcgtttctgggctgttttgttctactgatttctgtttctgtcccttcaccaatgccctgctgtcttgatttctgtaactctatacttacgaaattcctccgacttcctttttttttaagacagagtcttgctctgttgtccagactggagtgcagtggcactcacatctcagctcgctgcaacttccacctcctgggttcgagcaattctcctgcctcagcctcctgagtagctgagactacaggcatgtgccaccacacccagctaattttttgtatttttagtagagatggggtttcaccatgttggccaggctggccttgaactcctgatctcagatgatccacctgcctcggcctcccaaagtgctgggattacaggtgtgagccactgtgcccggccagctgattttaatattaggctgttttcttatttctcttttttttttttttgaaacagtctcgctctgttgcccaggctagagagcagtggcacgatctcagctcactgcaacctctgcctcccggggttcaagtgattctcccgcctcagcctcctgagtagctgagattacaggcgtgcaccactatgcctggctaatttttgtatttttggtagagacgggatttcaccatgttggccaggttggtctcaaactcctgagctcaggtgatccaccggtttcggcctcccaaagtgctgggattacaggcgtgagccaccgcacccggcctgttttcttatttcttaacattttttaggagttccttatacattcggttattaacccctgtcttcaatacctattaaaatagtggctctgacctatcattgtctttgccctctgtttagggggtcttttgccacacagactttttagtgtttcttagtgtggctccaagtcactttatggtacattttaaacctgagtaagcttggtctcccttcaccctgcttatcttcgggattcttgcctgttttttcttttaaatcaactttaggcataactttcataagataaaatatgcttattttaaacgcagagtttgggctgggtgcggtggctcacgcctgtaatcctagcactttgggaggccgaggcgggtggatcacttgaggtcagttcaaaaccagcctggccaccacggtgaaaccctgtctctactgaaaaaaaaaaaaaaaatagccaggcgtggtggcaggtgcctgtaatcctaactacttgggaggctgaggcaggagaattgcttgaatctgggaggtggaagttgcggtgagacgagattgtgccatcgcactccagcctgggcaacagaaggagactgtgtctcaaaaaattttttttataaaaaggctgggtgcagtggcttatgcctgcaatcccagctttgggaggccaaggtgggcggatcgagaccatcttggccaacatggtgaaaccccatctctactaaaaatacaaaaattagccaggcctgggggcagatacctgtaatcctagctactcaggaggctgaggcagaagaatcacttgaacccgggaggcgaaggttgcagtgagcctagatggctccactgcactccagcctggtgacagagcaagactccgtctcaaaaaatttttaaaaaagcacagtttggtgggttctaacacgcgcacacatctacgtagccactgacgccatcaagacatagaacctttctatgactccagaaagttcctgtgcacccccgcagccaatcctcacgctacaacccagtccccagccccaggtcctccacccaagccaaggtgcattgtcacaactaagaaattaaccttcatgcaatactgctaaccaaactacaaactctaatcagatttcaccaattttctcaatgagatttttttctgctgcaggatctgaccctggcttagttgcttttagttctcacatctccttggtggcctcaggtctcggccatttctccaccttgcactgtctgcctgtggattccgggttcccacccagggctgctgcctccatgtcccttgttcctcctggcggcacaggcctcactgtttccccgccgatccccatgcgtgtcaccggaggatgagcgaggccagcgccccggccactctctctgcagctgcagctcaggcctgccccagccccagcccctctgtcctgtctcccaggtcaggctcgggcagctgctgaagcagcaggagaagatgatccgtgccatggagttggcggttgcccgcagagagaccgtcaccacccaggccgaggggcagcgcaagatggacaggaaggcgctcacccgcaccgacttccaccacaagcagcttgagctgcgccggaaaatcagggacgttcgcaaggtagggagcagcggaaaggaaacagggcgcctgctcctctctctgggattcaaggaacactccaggaaggcgtcttgctgggtccggggtgaggatgcagaggctgcagtgggggcgtgctcagcactgctaacctgctgctgggtgctgggtctggggtgaggatgcagagagaccatccccagttctgctaacctgctgctgggttcggggtcaggggtgaggatccagaggctgttagaggggcgtgctcagcactgctaacctgctgctgctacggggcctgtctgggagactgcagaatgcccgcaccggacagagctgctgacacccagagacggccgtgtttcagcccctccctgcatatcggaggtggcattgggaaggcatagagttctggggaagaggccagctcatgctggggagcccgagtgggcaccggggaccagctgatgggagcggggtgggcgcctcgagagcctgcatccgcataccccaggccatgtccactgggcctgcactgggagggcccagctggtgctgtccggtgcttaccacctcaacggttgccagccaggggccctgcactcacacttcccaggttggccccacagccccgctgacccgctgtgtgacctcggagtatgtgggccttgccagacctgcagggcctcgtctgctggggggtggaggggcagagttaaatgtgacagcaaccacagccgtgggtggggaggtggccttggggacagctgacagcatggcttggagccacgctggaccattcctgactggggcatacggtctgacctcccagagccttggtttactgacctgtgaaatgggtgcccacctctcagagtcacccagagggttccctggagagtgctgaagtcatccctgtagggaaaggctagccaaaaatggcagacatgcatgggctgctcatttggaagtaactggaagtttctggagagaggcggcagagtggcctcttctcagtccttttccactacattggctactcctgatgtccatccctccctcagcttcctagcccggcccctgaccactccttgctgccctgggcaccccctgagtcccctgccaggaccccatgcccacccctcacctcctgtctgctccaagccacactcaagttctccagccccaggccctgcgccccacacgacgccatcactgatgggtccttgtcctcacccctgccagccccaccccaaagatcttccgtgtccccagccagccctgagagtcactgtgtctcctgcatcaccccctggaccatgtcagctgccaaacactgcctgcccggcttttctttctcttaattgtgctgctttccccgaaggcggaacgaacaccacacagatggccccagcctcgctcctccctcagcagaggcccccaccctcctctctcccaggctccccagcctgcctctcggcccttacagcctcagccctgcccttggcacacggctgctgaactgtgccagtctcctgcctggggacagacccactgcacggggagccccagaaccactcaggcccccatctctctgccacacctgccttaaaggagcagtgtgcagtgtgggctggctgggcctggcatctcccaggcctcgcctctccagccctcccattcctctttgggagcctccctggatggagtgtgtggaaggtgcctggcaggtcctcccagcctgactcttccctgtccgccaagtagccgggctgcaggggcccagcatggtcctgtgattctcctaggccaccgatgagtgcaccaaaaccgtcctggaactggaagaaacacaaagaaatgtgagcagctccctcctagagaagcaggaaaagctgtcggtgattcaggcagacttcgacacactcgaggccgacctcacccggcttggggccctcaaacgacaggtaaacgtgtcccaggaggtccctggggatgacggccatggaacatgccactcacacagaggtcctgcgtcccctctgtgcgagtcacggcctctcctgatcaggtcacggcctctcctgatcccaggccagtaatagcaccaccggctgctcacatgtttgtggctttgtgatttgttccactgacaaatgttgatggagtatctgttatgggctgggctcatgttcagcgtgcgagggttacaaaatagaacacaaaaaacaaacattcctgtgctcttagaggttacctcctggggcaggaggacagatgatgagcaaaataattttaaaagatacagtgtgttgtagctaggcatggtggtacacacctgtggtgccagctactcaggaggctgaggtgggaggatcgcttgagcctgggaggtcgagactgcagtgagccaaggttgtaccactgcactccagcctgggtgacagagggagatcctgtctcaaaaagaaaagaaaagaaaagaaaagaaaagaaaagaaaagaaaagaaaagaaaaagggaaatggtgtgttaggtggtggtaaatgctttgaaggaagataaaccagagaaagaagcgtcagggtcattggggtgaactgagggattgacattttgagttagggtgatgcgggaaggccctgcggagcagacattggagtccagacctgaaggaggggacagcccacaaaaccaccccaggtggacaggacagcccggcaaggcagaagcctgagactgcgcaagggctactagaggccagtggggcaggctggggaggttagggtatgtaagacccaggcagagaggggcggcccagactgtgtgcggccttagggagagcacaatcatgactttggacttttctcttggggaggtgggcacacagaggagggcgttgggtctgagaggtgacttgggctttagcgggctcccgcgcgctctaagattgcatgtggatgaagcatggatgcggggggcacctggggctatttgcagtgcttcagggcggcccctgtggggctggcgagaagccatcaggctctgcatatgcgttatgccaacatcgcccgatgggattcctgctgggttggctgtggtgtgagcagagacggaggtggagaatggctccaaggttctggcctggccaactgagatgatgaggggaacgtgcctggcactgggcctgacacacggcaggtgtcaagaaggttgcctaagccgggcacggtggctcatgcctgtaatcccagcactttgggaggccgcagcaggtggatcacttgaggtcaggagttcgagaccagcctggccaacatggcgaaaccccatctcaactaaaaatacaaatattagccaggcatggtggcgggcgcctgtaatctcagctacccgggcgtggtggtgggggtgggtgcctgtaattccagctagttgggaggctgaggcaggtgaatcgcttgaagccgggagccagaggttgcagtgtgccaagattgtgccattgcactccagcctaggtaacagagcgagacagcctcaaaaaaaaaaaaaaaaaatgccggcgggtcacagtggctcacacctgtaatcccagcactttgggaagccgaggcaggcggatcacgaggtcaggagatcgagaccatcctggctaacacggtgaaaccctgtctctactaaaaaaaaaaaaaatacaaaaaattagccgggcctggtgacgggcatctgtagtcccagctactcaggaggctgagacaggataatggcgtgaacccgggaggcggagcttgcagtgagccgagatcgcaccgctgcactccagcctgggcgacagagcaagactccatctcaaaaaaaaaaaagaatgcctcctagatggtgatgatgggtgacccataaagcaccgacccagtgcctctcagcctcttccctgagatccaggggcgcaacaccttcacgccgtcccttttcaggcgtaggtctcgcctcctcttcggcatttcctggaatctgagtttgtggggggccagcaggtgtctttcttctggtttgcatagccctatatggagtctcttttcctacccagaacctttcagagatcgtggccctgcagacacgccttaagcacctgcaggctgtgaaggaggggcgctacgtgttcctgttccgctccaagcagtccctagtgctggagcgccagcgcctggacaagcgactggctctcatcgccaccatcctggaccgcgtgcgggacgagtacccccagttccaggaggccctgcacaaggtcagccagatgatcgccaacaagctcgagtcaccagggccctcctagggagcagcctggactccgccttgcaaggcctccaggaagagatccggaattgtgtttgtcatgagggacttggaatcttttgtgttcctaaaaaccacatgtaccctcagaagggcatcgtttaagagaaataagccagccccacccataggaatctttttagccactcagcaatttaataaaccaggtaaaatcctagcgtttcccatggcatcccatcgcaaagacagagcctgtgactgcagacccacacacccacactcccacactgggcttactcgtccaggtaacactttggtttgcagcactcccaaatctgcacgtgcctctcacaacacaacgctgccacaggtccacaagctggtgggctgagcagaggtgggaaagttaaggcagctccagccagcctggcccgggaggctggtccccccagcacttccctctactaggtgcatctgaaaacccacaaaccaccttctttaccagttttcccatccccaccccttagaactctcaggtcccttttcctgcccccatgtccccatttgagttaaattcagatccacagcttgcaggagaaagtcagtggccccagacacacgtaacagggtgagcactgaaataagagcacgctggggcgtccacaccaagggactacgccccagtctgcccacctatcttttctccatcattaacccagcgctctttctccctggacttccaagtaccaatgaccttggggcttctttgcagtttaaagggaaaatgctctacaaaataatttcactttcaaacatttcagcagaagaataaaatcttttttctgaatatctagtaagcctttctgagtcagccttacttattttaaaacattgtagaaatacagaaaccacaacagaggtggaagggaggcttttgtttttttttttttgagacggagtctcgctctgtcgcccaggctggagtgcagtggcgcggtctcggctcgctgcaagctggaaagggggcttttaatgcccctatgcccctacccaggaacaacacctctgtgttttggtgtggctccttttgtatttttctgcacatacattttattaggcaagttaaggttatactgtgtgttttttgtatctcacatgtaaaaatgtgctcctcttaatgtaagcattttctcattttatgaaaaaattccccctgtgtcagtttaatgttttctcaattgtcagttttatgggttatcacaatgttttgattattcctttctggaataactgtgagttatggagcacacttaaggactttccaaatgttggctgtttctaacttggcgctgagcgcctttggccgcctttccgatgatgccctcgggacgcgttggcaggaggaatccctgggcgcaaggcgcggctgggccagccccttacaaagccctacgagctgcggggacccaggccggggcagcgggggccacgccccatctccgaccccacggggaccgggccgggactgcgccagcgggggcctcgccccgtctctgaccccagaggaaccggcagcgggcagcacgcgtgggcctctccccgcgggacgccggacgcgcagccagacgcgctccccaggccccctccgagagcgaggacgcgcccaggcccgctctgccggagccgccactggggggcgtagcgcggacgcgcacccttgcctcgggcgcctgcgcgggaggccgcgtcacgtgacccaccgcggccccgccccgcgacgagctcccgccggtcacgtgacccgcctctgcgcgcccccgggcacgaccccggagtctccgcgggcggccagggcgcgcgtgcgcggaggtgagccgggccggggctgcggggcttccctgagcgcgggccgggtcggtggggcggtcggctgcccgcgcggcctctcagttgggaaagctgaggttgtcgccggggccgcgggtggaggtcggggatgaggcagcaggtaggacagtgacctcggtgacgcgaaggaccccggccacctctaggttctcctcgtccgcccgttgttcagcgagggaggctctgcgcgtgccgcagctgacggggaaactgaggcacggagcgggtgagacacctgacgtctgccccgcgctgccggcggtaacatcccagaagcgggtttgaacgtgcctagccgtgcccccagcctcttcccctgagcggagcttgagccccagacctctagtcctcccggtctttatctgagttcagcttagagatgaacggggagccgccctcctgtgctgggcttggggctggaggctgcatcttcccgtttctagggtttcctttccccttttgatcgacgcagtgctcagtcctggccgggacccgagccacctctcctgctcctgcaggacgcacatggctgggtctgaatccctggggtgaggagcaccgtggcctgagagggggcccctgggccagctctgaaatctgaatgtctcaatcacaaagacccccttaggccaggccaggggtgactgtctctggtctttgtccctggttgctggcacatagcacccgaaacccttggaaaccgagtgatgagagagccttttgctcatgaggtgactgatgaccggggacaccaggtggcttcaggatggaagcagatggccagaaagaccaaggcctgatgacgggttgggatggaaaaggggtgaggggctggagattgagtgaatcaccagtggcttagtcaaccatgcctgcacaatggaaccccgtaagaaaccacagggatcagagggcttcccgccgggttgtggaacacaccaaggcactggagggtggtgcgagcagagagcacagcatcactgcccccacctcacaccaggccctacgcatctcttccatacggctgtctgagttttatcctttgtaataaaccagcaactgtaagaaacgcactttcctgagttctgtgaccctgaagagggagtcctgggaacctctgaatttataactagttgatcgaaagtacaagtgacaacctgggatttgccattggcctctgaagtgaaggcagtgttgtgggactgagcccttaacctgtggagtctgtgctgactccaggtagtgtcaagattgaattgaattgtaggacacccagccgtgtccagaaagttgcagaattgatgggtgtgagaaaaaccctacacatttaatgtcagaagtgtgggtaaaatgtttcaccctccagcccagagagccctaatttaccagtggcccacggtggaacaccacgtccggccgggggcagagcgttcccagccaagccttctgtaacatgacatgacaggtcagactccctcgggccctgagttcacttcttcctggtatgtgaccagctcccagtaccagagaaggttgcacagtcctctgctccaaggagcttcactggccaggggctgctttctgaaatccttgcctgcctctgctccaaggcccgttcctcagagacgcagacccctctgatggctgactttggtttgaggacctctctgcatccctcccccatggccttgctcctaggacaccttcttcctcctttccctggggtcagacttgcctaggtgcggtggctctcccagccttccccacgccctccccatggtgtattacacacaccaaagggactcccctattgaaatccatgcatattgaatcgcatgtgggttccggctgctcctgggaggagccaggctaatagaatgtttgccataaaatattaatgtacagagaagcgaaacaaaggtcgttggtacttgttaaccttaccagcagaataatgaaagcgaacccccatatctcatctgcacgcgacatccttgttgtgtctgtacccgaggctccaggtgcagccactgttacagagactgtgtttcttccccatgtacctcgggggccgggaggggttctgatctgcaaagtcgccagaggttaagtcctttctctcttgtggctttgccacccctggagtgtcaccctcagctgcggtgcccaggattccccactgtggtatgtccgtgcaccagtcaataggaaagggagcaaggaaaggtactgggtccccctaaggacatacgagttgccagaatcacttccgctgacacccagtggaccaagccgcacctttatgcagaagtggggctcccagccaggcgtggtcactcctgaaatcccagcacttcggaaggccaaggggggtggatcacttgagctcaggagttcgagaccagcctgggtaacatggcaaaatcccgtctctacaaaaatacagaaaattagctgggtgcggtggtgtgtgcctacagtcccagctactcaggaggctgaagtgggaggattgcttgagtctgggaggtggaggttgcagtgagccaggatctcaccacagcactctggcccaggcgacagctgtttggcctgtttcaagtgtctacctgccttgctggtcttcctggggacattctaagcgtgtttgatttgtaacattttagcagactgtgcaagtgctctgcactcccctgctggagcttttctcgcccttccttctggccctctccccagtctagacagcagggcaacacccaccctggccaccttaccccacctgcctgggtgctgcagtgccagccgcggttgatgtctcagagctgctttgagagccccgtgagtgccgcccctcccgcctccctgctgagcccgctttcttctcccgcaggcctgtaggagctgtccaggccatctccaaccatgggagtgaggcacccgccctgctcccaccggctcctggccgtctgcgccctcgtgtccttggcaaccgctgcactcctggggcacatcctactccatgatttcctgctggttccccgagagctgagtggctcctccccagtcctggaggagactcacccagctcaccagcagggagccagcagaccagggccccgggatgcccaggcacaccccggccgtcccagagcagtgcccacacagtgcgacgtcccccccaacagccgcttcgattgcgcccctgacaaggccatcacccaggaacagtgcgaggcccgcggctgttgctacatccctgcaaagcaggggctgcagggagcccagatggggcagccctggtgcttcttcccacccagctaccccagctacaagctggagaacctgagctcctctgaaatgggctacacggccaccctgacccgtaccacccccaccttcttccccaaggacatcctgaccctgcggctggacgtgatgatggagactgagaaccgcctccacttcacggtgggcagggcaggggcgggggcggcggccagggcagagggtgcgcgtggacatcgacacccacgcacctcacaagggtggggtgcatgttgcaccactgtgtgctgggcccttgctgggagcggaggtgtgagcagacaatggcagcgcccctcggggagcagtggggacaccacggtgacaggtactccagaaggcagggctcggggctcattcatctttatgaaaaggtgggtcaggtagagtagggctgccagaggttgcgaatgaaaacaggatgcccagtaaacccgaattgcagataccccaggcatgactttgtttttttgtgtaaggatgcaaaatttgggatgtatttatactagaaaagctgcttgttgtttatctgaaattcagagttatcaggtgttctgtattttacctccatcctgggggaggcgtcctcctcctggctctgcagatgagggagccgaggctcagagaggctgaatgtgctgcccatggtcccacatccatgtgtggctgcaccaggacctgacctgtccttggcgtgcgggttgttctctggagagtaaggtggctgtggggaacatcaataaacccccatctcttctagatcaaagatccagctaacaggcgctacgaggtgcccttggagaccccgcatgtccacagccgggcaccgtccccactctacagcgtggagttctccgaggagcccttcggggtgatcgtgcgccggcagctggacggccgcgtgctgtgagttctgggctctgtgccagcatgatggggagggcgacgcgcatttctcacacggcagggagggccacacgcgtttgtttctcacacgatgggcagggcgacacatgtttgtttctcacacggcggggagggcgacgggcatttctcacagggcgctccctgggtcttttactcacataggtctaaatcccatgtaaacacgtgttcaggactcaccaagcccctgcttgtcatttaactcaggaaaactctcaggaacgacagcacttggatttgccttaatcttaagagaagttgccttcggaaatgcgtttttctttttttgctcattcatttactcagtgtccacgcactgaccctccgtgccgggtggtttggatcctgctcccggggacagacacacagtgaggggaagccataagcaagtccatgcagacacagcgtcagggagtggtcatgcagagagcacgctagaagccagctgtgcagacacggggcagggaggtcccctctagaagccagctgtgcagacgcaggggacagggatggcctctctggaagccagctgtgcagatgttgggggcaggggtggcctctctggaagccagctgtgcaggagtggggggtggggaggccactctggaaaccagctgtgcagatgcaggggacaggggtggcctctctgagctgacctctgagtagagagacccaagagaagtttctcaaagcatcttatcaagctaggtatggtggttcatgtctgcaattccagcactttgggaggccaaggcgagagggtcacttgagcccaggagttcaagaccatcctgggcaacatagcaagaccccatctcttaaaaaataaaaataaaaaattagctgggaattgtggcacatgcctgtggtcccagctactcaggaggctgaggcaagaggatcccttgagcccaggggttcgaggttgcagtgaaccatgattttgccactgcacttcagccttgctgaagaccccgtctcaaaaaacaaacaacaaacaggcatcttatcagatctcggtcttgaaagcactcagcgtagtcttgcccaggggagggtgggtgcggtgtgagcccgtcctgcgaaattagctgtgctgtgttaacagaggacgcgtcttcctgtggaccgggtttatctgcggctttcatttctcggaggtgctgtttgccttgcacttgacccccagcaaacctcaggggtccttctcaggcatggctgggctgggatctgggaggactttggccacaagctcctaggcctggaaaggttctgttcagcccctgcccagccttgcttggggtcatgggacaggcatgtgtgccagttccggtaccagccagttcctggaggtcagccccttgggggcccctcaggggtggtgtgggcccagccaggcggtgcgcctcttctgatatgccctgagagttgatcacgctggtgccagggtgccaagggctgcagggctcggcacggccgcctgtcccagggtcagtgtgctgcagggctggccaggccactccgccctcccagggcaccagggcccgggggtgctctctgggtgctctcaggctcgtgtggccccttgggtgtgagcaagcctggctggcctctgtcccgcaggctgaacacgacggtggcgcccctgttctttgcggaccagttccttcagctgtccacctcgctgccctcgcagtatatcacaggcctcgccgagcacctcagtcccctgatgctcagcaccagctggaccaggatcaccctgtggaaccgggaccttgcgcccacggtacagcggcgggcggcgggcgggggcactgagctggggagcgcaggtgctgaagcgccgtctcctgcatgtcccagcccggtgcgaacctctacgggtctcaccctttctacctggcgctggaggacggcgggtcggcacacggggtgttcctgctaaacagcaatgccatgggtaagctgcccgccgcccagcgcccgggccggggtctcctccgtgctgcctgccctggagactggaggtccgcatgaggggccctgggcacggtgctgggccttgtgttttctgggaaatgagtcctatgggctgatgcctctcccaactctggccttctgtgctcctaaggagggttctggggccctgcctggaggtgggctggcaccacatatctttccgtcccatgccaggttcctcctgagtcaggcttagcacggcttccccaggccactctgagctcctcgtggggagagagcctcaactctccgcctgtgattggcccatctgtggggtgcagagccctccaagtgaagaatctgtcccccaaccccagagctgcttcccttccagatgtggtcctgcagccgagccctgcccttagctggaggtcgacaggtgggatcctggatgtctacatcttcctgggcccagagcccaagagcgtggtgcagcagtacctggacgttgtgggtagggcctgctccctggccgcggcccccgccccaaggctccctcctccctccctcatgaagtcggcgttggcctgcaggatacccgttcatgccgccatactggggcctgggcttccacctgtgccgctggggctactcctccaccgctatcacccgccaggtggtggagaacatgaccagggcccacttccccctggtgagttggggtggtggcaggggaggcaaggggctggccgggacgcgtctcctcaggccccagcagacggtcccgtgttgtggctgcaggacgtccagtggaacgacctggactacatggactcccggagggacttcacgttcaacaaggatggcttccgggacttcccggccatggtgcaggagctgcaccagggcggccggcgctacatgatgatcgtggtgtgtgcccccacactgtgggtctttgggaagggggccgcccggtgcccagtggctccttctctgtgcagcgtcatcctcgtgcctgtgtggtcgccgaggatgttttctgagggtctttgtgatatcgagggaatatcaagaagtttgcaggcttggccccagctgtccagggaggtcgggtttgagggtccccagaaatggccgggtgctactcagggttctgtcagatgtaggttacttgaactgccttaaagcaaaaggccaggggcatgataaactgatgtcacctggtcctggaaagtggagggcccggtgggcctgggcatgggtatcgctggaactgtggaggctccgtgtgccttctggccgtgcctctccttctggccggctctgaatccctggaaaggacggcgtgagtgagggcagcttccagccctcatgctggcaccacagagcggagacttcttcccatcagctcccatagaaaagtcccaaagcaggactcttgagtcacccagcacaaagaggcccttccctgagccagtcccacagccagaaggatgcagtttgggggctggtccagcccgagtctggtgtccggcacgatggccagaggaggaggtgggaggcagggcgagctgaaaagatccaacagttcctgcccggaagatccacttcagcagaggaagcacagatgagatgtggggctgtgctgatgctgcctgtttccatccctgccttctgcaggcagcaaacagtagtagcccttaagagcaggagtggaaacacagacttttttctttctcacatttttttaattataaaagaaaagtgattactgtagaacacttgggaaactctagaggtttaaagaaaaggtaaaggtaaagcttccattccggcgcgcccctcatcagccagctggtcctgactcgcccggccctggctcctctccaggcaggcgtgtgcaggcatgtgcaggtacacaggcaggcatgctgtacacacgcatgatgtcatccccagcctcatcctctcactgtctcagttttccccgtggctggcgccagggctctgggccaccctcaccttgacaggtttccctcttcccaggatcctgccatcagcagctcgggccctgccgggagctacaggccctacgacgagggtctgcggaggggggttttcatcaccaacgagaccggccagccgctgattgggaaggtagggcgagggtccaggggacgggggttagaaagcagaggcctccagccagggggagccggcagctgctcaggaagacggtgggatttgaggagccatcacgcccagtgggacagctgagaggaatgggccacagtggcccgtgacgatggtggctcctacaaggaatggccccgtgagttcttccatcagcaggcctttgacttcatgggcagctgggcctggcccaggcacaagccctgcagaccctcagtgaggccttagggtcctccttgtcctcccagccccccaggggcctccaggcagggcccccgctgagggagcagctagggagggtctggtgcggatgtgaggctgcctggcagggcttgcacggggccgtctccgctgcccttctccctgacgctctctggttctgcagcccagcccctgggtggacgtgttgggggtgacccctcgttttcccagggttgaggccccttggccccgcatcagtgccttgtggagaaagagctgctcattgacctccagggtgcaggtctctcagatttgcaaatgtgggcgtccactaagagtgaggctgcccctctgctcaggctgaggctcagtggggcttccatgcaggccctgggtggggccgggtctccccactgcagcctctcgttgtccaggtatggcccgggtccactgccttccccgacttcaccaaccccacagccctggcctggtgggaggacatggtggctgagttccatgaccaggtgcccttcgacggcatgtggattgtaagtgtggccccctcctgagcatccccaaggcctctggggactaccccaccctcctcactctgggcagagtcacctaccagcagcgcttctcttgcaggacatgaacgagccttccaacttcatcaggggctctgaggacggctgccccaacaatgagctggagaacccaccctacgtgcctggtcagctcgccccccacctaccctggggacttaatcaaatcagagactcccttgtctggcctgggagacttagcaccctcatctctgagaagcagatgggccagcggggaaaggggcgggggggggatccccaggagaaaggctcaggctgggagactcagccaagcagtgcagacagggtgggtgcagaggcacaggccctgccggaggagacgccgctcacaggtgcttgccagagcacagtgaggccgactcgactcagagccgtctcgataggcgcagggaccatgcagcggagacctacccacccgtggggagaggtcaggcccaactcgaatgcagcacgggcaagtggatttctagccagggagcagggtgggctcagaggcaggaattaccaagaagaagcatgggggtcagggggattctggctgaactgacccagcaggattcttgctgaaggcaggccagggtgaccagacatcgcctgaggggtggtggaggttggggcttctcgccaaactgtcttagcaggaatggcagaaactgggttttacaaggaagtacaaggatgggcctgggagaaggtttgggggcctgaggctatagtttggcccagcaaagaatcagtgagaggatggggttttgggcttaggtaaacaggcaggggagtgcttgaaatgggccaagagacggtggatgtgaagtctgggggtctgcagagcccaggctccagcacccgcccagccctgtcttagaagcagtggagatgattacccaggttcccgggtaacgccagccccacagaggcgtggggagcggctgcaggtgcacctccagggccagcctgaagaggcagcgacctgcacaggggctcctgggaggtggggggcagggagggcaccttggagcctgccgggaggaagctccctggaaaccagcccccgcctcttccaggggtggttggggggaccctccaggcggccaccatctgtgcctccagccaccagtttctctccacacactacaacctgcacaacctctacggcctgaccgaagccatcgcctcccacaggtgagggccacgtcccgccccactgggctctgccctcacagcctgtcctacaaggttggggcctctgcagggcctcagggaggaggaaaagcggaggcccagaccacccggggcccgctggcggcccgagtgctctccccacccgctgcctgcaccccagcctgaagctggagcgctccttcccacttcatgcctggggcttggagaggaaggaccctggatgctgacaggagtctgcatcagcggggacctcatgactcctgtgaggctggggggggtcctggctcacctacaggcatcaggtggcccagacagaggcaactgtgcccgcagacatgggcagtagcctcgccgtcctcctccccagcctctgcctcatcccagaaagctccttgctcccagctctgccctgctggtgacagggttcccgagtgaccccgctccacacagccctcacggtgtcccccaccaccccagggcgctggtgaaggctcgggggacacgcccatttgtgatctcccgctcgacctttgctggccacggccgatacgccggccactggacgggggacgtgtggagctcctgggagcagctcgcctcctccgtgccaggtgagctcctaccaggaggggctgctcagcagagtagagccgggggcctctatgggaggcttgccggggccccccacccacttagcaggtggggctctgggtcacttggcctgagctggctctgctgcagcagcctgaggaccagcctgactctgccctcccagaaatcctgcagtttaacctgctgggggtgcctctggtcggggccgacgtctgcggcttcctgggcaacacctcagaggagctgtgtgtgcgctggacccagctgggggccttctaccccttcatgcggaaccacaacagcctgctcagtctggtagggtgggggtggcggcatggcaggtgggcgatcccacccacccaagactctcccctgggaatcccacccctgctggagaagcaccccatgctgggtggctgagaagtgcagctctcccgaggcggggactccaggggaccgcggccccagcacccaagtgcttcctttgcccccgcctgccctgcagccccaggagccgtacagcttcagcgagccggcccagcaggccatgaggaaggccctcaccctgcgctacgcactcctcccccacctctacacactgttccaccaggcccacgtcgcgggggagaccgtggcccggcccctcttcctggagtgagtgacctaggcaggggcggtggcccatgtgtgccctgggggaggggcacgtaactcccaggcagccctgtcctgctgtgggctgtgttccccaggacccagcaggttgccgctgagtgagacaacatttgggcctggcttaagggggaagggcagcaagaaaacccagtaatatcccccagacaggccgtagtacacacgaggagttcctaacaacagccctgcacatcagtgtgttgagggaggattcccagagagtgaggtgattagttaactatttgcagaagtcaatttatttttcttgcataccatagaaacataagttccagataaattaaatagttaatgtcaaaaatcaagctgtggaggccaggcacggtggctaacgcctgtaatcccagaactttgggaggctgaggcgagtggatcacctgaggtcaagagttcgaggccagcctggccaacatggtgaaacccatctctactaaaaatacaaaaattagccgtgcatggtggtgggcgcctgtagtccctgctactcaggaggctgaggccagagaatcccttgaacctgggaggaggagattgcagtgagccgagatcgcgccactgtactccagcctgtgtgactccatctcaaaaaaaaaaaaccaagctgtgaaagactccacaggaaaagataagtgaatgtgtatctctggggaaaggtttcatttagagaaaaaaaaaaaaaaaaggtgaactttatttgaccatagcagaaaaaaaaatgtaaatctctgaatataaacacaaaaagattaaaactgctctgaacatggactgtaacagcagagaaggcattgtcaataaaacagcaaatagctactcttcctaataggtagagaactcatacgttggtaagaccaagactaagaaccaaattggaggaacactgtttgcaaaacaggagatacgaatggtatccacacattcttcacccggaaatccaagaaacgcaatttgtgttttaattactattttaatgaccttgttgtttctgtcactacacttttttttttttttttttagtggttgccctagggattacaattaacatcttaattttagcctcgttggaactgatgccaacttgctttcaatagcataaaaaagctttgcttctatgtggtttccattgcctctcgttcctctgtgctgttacacgtctgtatccatgatgagcccatccacgcagatttataatgaccgccttattcaattatcttttaagtcaaataggagggaaaaatgggttacaaacaaaaagtacatacacactgtctgccttttatatttactgatgtagttacctttacccatggttttatttcttcatgtggctttgacttcttgtctaacatctttcatttacagcagaaggactccctttagtatttattgtagggcagttctgctagtgatgaattctctcagtttttgttgacttcagagtctcttaatttctccttcattttttgaaagttctgctcaacgtagggttcttgactggcggtcgtttctctgaacactttgaacttgtcagcccatggcctccgtggtttctgctgagtagcttctgtcttgcctcttcccagattctctgtctttggcctttgaagtcccgatggtgtgtctaggtgtagatctctgagtttatcttactgggagtttgttgagcttcttggacgtatgcattgatgtttttcatcaaacttgggcggtttttcagccattacttcataaaatattttttctgcccctttctgtcttctactctgggacttccgttccacacattggtatgcttgacggtgcccaggggtctttgcagctctgttgactccttcctcgttgtgttttctttctgttcttcagactgcttagtctgactgccctgtcttcaaggtcactgattcttttttccaccagttctcatctgctgttgagcccctctagtgaacttctcattttagttgctctcttttcaactccagaatttctgtttcattcctttacgtttctctcgttaaggatattccctatctggtgagtcatgttctcacactttcctttagttcttcagacacggtttcgctgagctctttgaacacatttaaagtagctgacgtaaactctttgtctagtaagtccaatgtctgggcttctctagggacaatttttattaactactgtccccccatctgtgggccatactttcttgtttctttgcgtgtctcatacatttttgtttcagactggacattttaaacgcagctgctgtggtcatcagattccccatccccctcaggtctcgttgctattgctgattgttttgtgactttcttgagctaattccataaggtctgtgttcttcattgtgtgtggccaccaaagtctctgcttgactagcttagtggacagccaataattggtcagatatccttcacagatggcatccgtgagtctcccagcctttgctggggcgaggtggggagcaccgtcaacacttagctaggccaaggattcttgctgttcttacaaagattcagccattttgttaaatacatgctccccagatggctgcaaacccttggttagtttcaagagtcctaaaaatgtcaactctgaccatttttgccgatgttcctgttttcacagaggagaggatcttgagaggggcttactccaccatcttcactgacatcactccaagaaatgtattttgcaagaaatattttgaagcagaaagacaccatttattttgcccatgaattagaatacattagagaaaataagactatcccttgctggcaagaacacagtgacacagtagggtggaatataaattggcacatttgtggaaagcaacagtacatatcagtcaatgtttttgagattcacattgatgcgttaattttacaaatagaaatagggcctaaagaagtcacctcaaaaggcatgaacgctccatgaatgtatccatgcagggatcatagctgagcactggatgccccctgcacgtccgggggcaggaaacaggacagggcagagctgcgtcacagggcaggacagtctccgttagacggagaatcctccgtagagctgcttgcacatgtacattcatctttttgtcagatgttaattcaagttgcctttggttgtgggactgggaggatcttttctctttgttgatactttttcgtactttccaaatacttgactgatgagcacatgctgccttggttaccggaggataagtgagcgagcaaagtgaggccagtgctgtgtccatcctggtgcctcaagcacaagcccctattcctgccctgagcccagctgccggcatgtccggggagaaggcttctcccagctccggcattgacttctatctgctggaatcatccctgcccgtctgacctgagtcctccaagtcctccggcaccttgagctccagagagcagaattcagcctcttcctgtgcctccccagggtgggcatatgagccagccccatcccattcatcacccgtatgcctgtgtgcccatcccccttgcaggttccccaaggactctagcacctggactgtggaccaccagctcctgtggggggaggccctgctcatcaccccagtgctccaggccgggaaggccgaagtgactggctacttccccttgggcacatggtacgacctgcagacggtgagtctggggaccctaagccctggggagacgggagaccagagcagccctcccacctgccccctccacccagttggtgtgaccaggtggcggaaagaggaacgtatgtgttgagtcccggccatgtgccaggcccccacccggctgctccgcacccatcagcctctccgctcctcacaccatccccatttcccagatgagcagactgaggcctgcttgcagaacctggccaagtcccacggccatcacaggctgtgcctgtgctgagctggcatacccaggcctctcaggcactgtccccactcagtagccaggagggtccctacctacagtgagccctgagtctgcgcctgaagtcacagttcagcccgtctgtgccaggcctcctaggcctccacgtggagccccgggagatggagagcgtggttcctgaggacagcatgggggcctcggcacggcccagaatcctcaaagcaacatctccctccaggtgccagtagaggcccttggcagcctcccacccccacctgcagctccccgtgagccagccatccacagcgaggggcagtgggtgacgctgccggcccccctggacaccatcaacgtccacctccgggctgggtacatcatccccctgcaggtacctgggccaggcggctatggtgggggtgtggacagcacactgcagagctgggggaggcacagggagatggtgggggagaggcccaggtggggcttctgaggggccgccccccgcagtgtaggttatcaaggagccagccaggccagtgaggtggggagggcacagccccacaaaggcgtggagcatggccggcaggagctcagtggtctgcatggtggaggttctgccgggcccggcctcgggcagccgtgggatagcacttgaggtggggaaggtcttgggtcatcaccacggggttccagcccctgcggccgcaggtgttcctgcagatcctagttactggcagcctggtgctgtaccagcctagcattcccgggccctggaggcctccacctccaccagggtggggatgatgacatcacgtgtccttccctttccagggccctggcctcacaaccacagagtcccgccagcagcccatggccctggctgtggccctgaccaagggtggggaggcccgaggggagctgttctgggacgatggagagagcctggaagtgctggagcgaggggcctacacacaggtcatcttcctggccaggaatgtgagtcctggggctgctcaggctggtgggcaggggccggctcggggttgagaaggggtgaggggacctgggcttgggggtcccacgatggctacctgccactaggacactctagcaggtggcctggggtcctagagtgagcagtggggccgtgcactctgccctttcgtgtacacagagggaggtcacctccctgatgccatcatgagtccctgttctcatgggtgttcctgccccagctgtctgctgacacctccacattctctgccttttcatctctctctgctcggcccagaacacgatcgtgaatgagctggtacgtgtgaccagtgagggagctggcctgcagctgcagaaggtgactgtcctgggcgtggccacggcgccccagcaggtcctctccaacggtgtccctgtctccaacttcacctacagccccgacaccaaggcaagagggcccagagtggcacagggatcgcgtcccccagccgtggtgcagggggcagaaggtgctgggcgtcctggtgaccgatgccaggaacagaggatgctgggacctcccaagggggtctttggggaggagtgggaagggtcaggccacacaggctgtgcctttcctcctcctgtgtctacacgtgggtgatggggccacaatgacgacctctgagccgtgttgaagcagcaccgcgtttctggcgtgcgttaaggtgacccgcactgagagccggggtccccctgcgcctgccggggaggaaccgggtgcgaagcatcccagggccagacggagctgccccctgagcgccgggcctcgctgctgctgggatctcggggccagatggagccgccttctgagcgctggggtctcactgctgctgggatctcgggctgctccatttgtgctctctcttttccaggtcctggacatctgtgtctcgctgttgatgggagagcagtttctcgtcagctggtgttagccgggcggagtgtgttagtctctccagagggaggctggttccccagggaagcagagcctgtgtgcgggcagcagctgtgtgcgggcctgggggttgcatgtgtcacctggagctgggcactaaccattccaagccgccgcatcgcttgtttccacctcctgggccggggctctggcccccaacgtgtctaggagagctttctccctagatcgcactgtgggccggggccctggagggctgctctgtgttaataagattgtaaggtttgccctcctcacctgttgccggcatgcgggtagtattagccacccccctccatctgttcccagcaccggagaagggggtgctcaggtggaggtgtggggtatgcacctgagctcctgcttcgcgcctgctgctctgccccaacgcgaccgctgcccggctgcccagagggctggatgcctgccggtccccgagcaagcctgggaactcaggaaaattcacaggacttgggagattctaaatcttaagtgcaattatttttaataaaaggggcatttggaatcagcttctgcgggtctctctgggattcagggcagggaggatgtatccaggggccctggaacagaggcagctcctttgtcctcagcaggcccccagacattcccacagtgggtgtgcgccgtcctctgtctcaagccggcatccatcacgtcatgttcccatgtcacgaggcctgacatcacctcatgtcctgtccccatctcacctcacatcccgtcacctcatgtccccgcatcacctaaagccccatgtcacctttgtgtcccatacccccatctcacatgcctacctcatgtccccatgtcaccttcacgtcccatctcacctcacctcccctccccaccccacctcacctcccctcccctcctcccctcccctcctcacctgacctcccctccccacgtcacctcccttcccctccccacctcacctcccctccccacctcccctcccctcccctccccaccccacctcacctcccctccccttcccatgtcacctcccttcccctccccacctcccctcccctccactcctcacctaccctccccatgtcacctccccttccctccccacctcccctcccaccccacctcccttcccctcccctcctcacctgacctccccttcccatgtcacctctcctcccctcccaacctcccgtccccatcccacttcacctcccctcctcacctgacctcccctccctatgtcatctctcctcccctcccaccgcacctcccctcccctcctcccctcccctcctcccctcacctgacctcccctccctaccccacctcaccccctctcccctcctcacctcctctcctcctctccccattcatcctcacactcctgcttcccccatctctaaggtgactggggaatgtccagtgggtgttaggcatgtggtgggagtgtggcccccagggctgtgtagacaacaggaccctgcaaggaaggggctttccaacagtggggcctaagactttaggcagaggccagaaatctgtccccaagtgatgcagttagagaggatttcaggcccaggttctccctggcaagcccagagaaagggaaagaagcccattttattgaaataacagcaggagaaatcactgcccttagccagtcagacgcttcagtttatcacttagaattaatgcagtggctcacacctgtaatcccagcactttgggaagtccaggcgggcagctcacttgaggtcaagagtttgagagcagcctggccaacatggtgaaaccccatctctactaaaaatacaaaattaaggccaggcgcagtggctcacgcctgtaatcccagcactttgggaggctgaggcaggcggatcacgaggtcaagagatggagaccatcctggctaacatggtgaaaccccgtctctactgaaaatacaaaaattagctgggtgtggtggcacacacctgtagtcccagctacttggtctcgcaaggctgaggcaggagaatcgcttgaacccgggaggcggaggttgcagtgagccgagatagcaccactgcactccagcctgatgacagggcgagactgtctcaaaaaaaaaaaaaattaggcatggtggtgtgtgcctgtagtcccagctactcagaaggctgaggcacaagaatcacttgaacccgggaggcagaggttgtagtgagccaagatcgtgccactgcactccagcctgggcgacagagtgagactccatctcaaaaaaaaaaaaaaaaaggccaggcgcggtggctcatgcctgcaattccagcactttggtaggccaaggcaggcggatcacgaggccaggagtccgagaccagcctgaccaacgtggcaaaaccccatctctactaaaaatacaaaaattagctgggtgtggtggcacgcgcctgtaatcttagctactcaggaggctgaggaaggagaattgcttgaatctgggaggcggaggctgcagtgagctgagatcacgccactgcagtccagcctgggcgacagagtgagactccatctcaaaaaaaaaacaaaagaagtggccaaccccgaagtcctctgcagagcgatggattacttttgccaccttcctgaaaaccaggagcagaaagtacagtgacttccccgtggagcagcatgacatccctggggggcagtgtgtctacctgggtgaccagcactattgtcttctgggtcagcttttgtagaagcggacactgctcttctgccatgtcacaggccagggcctgacccccgtgtgccacttttaccatccagattgacatcactaagtcatctcgcgccctaaagttcctctgtaaggtggacgtagtagtgacaataacatatgttacttcctcccctcatcctagtcccatgtggggttaagaagcaggaatgtttgtcttgaggccagcagcgtgcctggtctcggtgctgagggcgacctgccctaacgctctgccaggctcgccaggtctgcagttgacacccaagacgttcagggagggttgatggagcgtggtagcctcggccagcctggaccgaccatcagcgtcctcaccttctgtgccaccgcccagcctggcagggccactgtagccttagccccttgtaggatctgacccttccttggctgctgtaacgaaatacccaagactgggtaatttataaacaacagaaatggatttctcacagggctggaggctgggaagtccaagatcgaggcaggttctgtgtctggtgagggctgctgtctgtatcataaatggcgcactctccatcatcgtggtagaaggcgaagacaagctcccttgagcgctaaatgccactgatgaggatggagggccctcaggactcatcacctcccaacagccccaccactttttttttttttttttttttgagaccgagtttcactcttgtcacccaggctgtagtgcaatggtgcaatcttggcttattgcaacctctgcctcccaggttcaagtgattctcctgcctcagcctcccgaggagctaggattacaggcatccgccaccatgcctggctaattggatctttagttgtatttgtattttagtttatttgtattttaattgagatgggatttcaccatgctggccaggctggtcttgaactcctgacctcaggttatctgcctgcctcagcctctcaaagtgctgggattacaagcatgaggcactatgtccggccagccccacctcttaaaaccatgtcattggggattaggtttcaacaggaatttggggcgggggcaaaccttcagaccataggacagggctatcaggagtcctgagtgaggaggttggcatggggtgggacagtgctccctgtgtgggaagggacagggtcggaggggggagaggagttgtttccatcctctgagaggccaggggtctcctcagggtggtccaaacggtacagcccattacatgggacgctggcctgtgggcacctcaaggcagcttcatctgtttctcaccagtgcctgatacaggccctgcctcagtgggaccctattgaacttaggtgaattttaaagcaataggccaggtgtggtggctcacgcctgtaatcccagtactttgggaggcctaggtgggcggatcacctgaggttgggagtttgagaccagcctgaccaacatggagaaaccctgtctctactaaaaatacaaaattagccaggtgtggtggtgcatgcctgtaatcccagctactcaggaggctgagacaggagaatcatttgaacccgggaggcggaggttgtggtgagccgagatcacgccactgcactccagcctaggcaacaagagcgaaagtccatctcaaataaaaataaagcaatgtggatgtggaccccaggcagccttgtagcggagacgtcttagtgccggggagcgttcaagctggcaccctccgccctgggagaagacatcctgggggtctcgtggctcagccctctcatatctctcccagctcagcctctaaaacaaggcctgctgttggtgacaaaacgctcttggctcatgttctgggcaatgagtcactgcgtgtggctgggccagcttcacaggtgtgacccatgcaggcccacaggccccgagctcagcaggctgcagctgggtttaatgctccacggtcaccatcttgaaattgtgaataacttttgaacaaggggccccacagcctttcattttgtgacgggccctcggcaaattctgcggctggtcctgcaaggggtggtgcgttctctcccgtttacgttggtatagatgaatataaacgcttcctttctttccttgcctggtggggaatggatcagaaagccagggctgatgatagaaaccagcagagaatctccaagtgtaagacattagtcaaaggcccggcgtggagcccacaggtccttagcgttcggaagacgattgccttcccagcccactccaaggaagaatcagtgctgtctggcagcagcctccaggtgtgtctccacaaaggcccagctttcctttttgcaaatcaatgacatcaataatccgttacatggcctgcagagaagccctctggcggccactgtggggccctgtgggccttatgcctgctcttcctgatctggtggaggctcagagaggagctaggacaagggatggtgcccctataccaccccacccccacatacgtgcctgcagaaggccacatgaccaggattatggtgggtgagggccagagggaaggcccaggtgagagggtggaatgtgaacaggctggttatttgcgtgccagggacaagagagaaaaaagctcagcattagcagagaagacggacttctgcggtggcacctacagctgttcccttggcctcccaaacaacccaggtgtgacgtcgggaaccgggaatgcaggcaacagagtgattccagctgcctcacaaggaagagggtgtgtgggaagagcagagcatccgggctggaagcacagtcagaaccatgcgtgcagccggacactcattgttcttccccacgtgtgctgggcacccgctctgcgtcaggctctgttccaggagttgggtgaaacggtgactgaaatagacagaactcctgtcggtgatgcccacgtgagagaatataatcaatggacaatgcaccgcacatatttaaaatgtgcaaattgatccgttttgacatgtgaatgtctgtgaaccagctctacagttaagatggtgaccatctccatcaccctcaaagtctccagctacccactgactggaaaccactggtatgttttttgtcaaaatatatttctttgtattttatagaattttgtataaaggggaatttttttgtcacacactactcaacataatttctttgagatttatccatcaataactcatcctttttggttgctaaatagttttccactgtatgcaaatgccaccatttctttatctgtcctttatggatatcagaattgtttttgatttttttgtttgtttgtttaaagacagggtcttggctgcgcgtggtggctcacgcctgtaatcccagcactttgggaggctgaggcaggcagatcacctgaggtcaggagttcacggctagcctggccaacatggggaaaccccatctctactaaaaatacaaaaattagccgggcgtggtggtgggcgcctgtaatcccagctacttgggaggctgaggcaggagaattgcttgaatccaggaggcggagtttgctgtgagccgagatcgtgccattgcactccagcgtggacaacagagcgagactccatctcaaaaaacaaaacaaaacaaaaacagggtcttgctctgtcacccaagcaggaatgcagtggcaccatcatagctcaccatagcctcaacctcatgggtttaattgatcctcccacctcagcctcctgagcagctgggactacaggcatgcaccaacacatgtggctaatttttaaaatattttgtagagatggtgtctcactgtgtttcccaggcttgtctggaactcctggcctcaggtcatcctcctgccttggcctctgaaagtgctgggattacaaacgagggccatcaccctcagcccctctctgcaatttttggctattatgaataaagctgctatgagcagtcatggacaagtctttgacattattttgtttctcttgggcaaatagcaaggatgatgtggtcagttcatacgggaggtaaactattcattgtttaagaggctgccaaactgtttccaaatcgctgcaccattctgcattcctcccgactgtgcaggggagttggcaggggctgcgtatccgggccagcattggcgtggtctgtttccttttagccattctagtgactgtgtatctcactgtggctcttacactcccctaatgactactgatgttgaacatcttttcacccacttatctgtcagccataaatcttctttggtaaagtgtctgttcgcctcttttgcccattgttaaactgggtcgttccttattatagagttataacatacgtcaattttctagtgctgccgtaacacatgaccacagtttgagggaattaaaataacacaaatgtatttcatcacagttccataggtcagaaatttgatacaagggctctcctggctgaaatcggggtgtcagcagggctgccttcctttccagaagctccaggggagaatccgtctccttgcccacatgggctactggcagaattgtttcatgcagttgtagcactgaggtctctgtttcccttctgtcagtcagaggtccttctcagcctacagaggcttcccccatatcttggctcatgcctttttcaaccccagaaatgagggacttgagtccctctcatgcctgtccttccttccatcacatcattctctgaccaaccatagccaaagaatagtcttgacttttaagggctcatgagattagattgtgtccacctagattatccaggatcccccatccaagatcctgcacttacttctgcaaagtccctattgtcatgtaatgtgacatattcacaaggtccagagatttggacctggcaatctttgaggacagttattctacctaccacataaagcttctttattgggccagtgtggtggctcctgcctgtaatcccaacactgggagaccgggacaggaggagttcttgagcaggagttagagaccagcctgggcaacacagcaagaccccatctctacaaaaagcaaaaaattaggccgggcgcggtggctcacgcctgtaatcccagcactttgggaggccgaggcgggtggatcacgaggtcaggagatcgagaccgtcctggctaacacggtgaaaccccgtctctactaaaaatacaaaaaattagccgggcgtggtggcggctgcctgtagtcccagctactcgggaggctggggcaggagaatggtgtgaacccgggaggtggagcttgcagtgagctgagatcgtgccactgcactccagcctgggtgacagagtgagactctgtctcaaaataaataaatttaaaaactaaaaataaaaaaataaaaaattagatgcatgcagcagcacatgcctgtggttccagctactaaggaggctaaggtggaaggattccttgatctcaggaggtcgaggctgctgtaagctataactgtggccactgcactccagtgtgggtgacagagctggactatctcaaaaacacacacacacacacacacacacacacacacacacacacaaccaaaaatcattatgctttccccataaaactgcttaagtgcctttgttggaaatccattgaccataaatgtgtagtctttctgaactttctactgttttccctggatctacaacaggtctatatttatgactataccacactgcctttgctactgtagctttataatatttcttggtatgagtagtagcttggtgcacttttccaaagttgttttggctatgctagatcctttgtattttcatataacttctagaactagcttgtcaatgtttagccctatccccactctcccaaaaaaggcttcctgatattttggttggaattgtgttgagtctgtacatcaacctggggagaactgatgtcttaacaatatcgactcttccaatctgctcagtgtatctctcatttatttacatctttaattctcacagcaacgttttgtagctttcaattacagagcttgctcatcttttgtcaaatatacccccaagtatttcatgtatttgatggtactgtatatggtggtgttttccaaatttcccattccaagtgttcattcctggcatataggaatacaactgactcttctatattgactttgtagaatgctaccttcccgaaactcaattattagttccagtagctttgtggtagactccttaggattttctacatagagaaacatataatctgtgaagaaagccttcttcctttccaccctggaggccttttctttctcttgccttgttgcactggccagaatccacagtgtaatattgaacagaagggagaggacacctgtgccttgttcctgagagggttactgaaagccccaattgccactgtggatttgtctatttccccttgcagttttatccatttttccttcctatatttcctgtattttgaagctgttattaggtgcataggtatttagtattgttatatccttttaatgaattacccctttatcattatcaaatgactctctttgtcccttgcaatattctttgctctgagatctcctttgtctaatattaatagagctgcttcaggtttattttgatgtgtgcgttaccatggtgtatttttctccatcttttcacttttgtctttatatttctcataagcaatagtatatagttgtgtatggctttataatccagcctaacaatatctgtcttttaattttgcagtaggcaatttgcttgttttcccttgctcgtgctttttgctttttaagtgtaattttagaggatgcatgagattcctcatgatatttgtgctgagatgtaattcacatgccataacatttaccattttaaagtatgcaattcagttgttagtacacttgtacaaccatcacgattatctaattccagaacattagaatcaccttcaaaagaaaccctatactcattttcagccactccttgtttcacccatccccctcctcccccctcaagctcctgaaaccactgtgaatggtttcctgctaatctctctatggatctacctgttcaggacgtttcatgtaaatggaatcacaccacgtgtggccttttgtgtctgccttcttccacctagcatattgccgaggttcatccaggttgtagtgtgtcagcacttcatgcctttttattgccaagtaatattgtgtggattcaccagttttgcttacagctgatgaacatctggcttgtgtccactttttggctcttatgaacaatgctatgaacacattaggtttatgtgtgcagattttttaattctcttgagtatagacctaggaggagaattgctaggtcaactcctatgttcaacattttgaggaactgccaagctgttttccataaaggctgtgcctgtttacaatcccactagcaatgtatgggggttccagtttctccacattctcctaaacactgcagagcagtatattagtccattttcatattgctataaagaactgcctgagcccgggtgctttaaaaaggaaagaagtttaattgactcacagttcagtgtggctggggagacctcaggaaacttacaatcatggtggaaggcgaagacgaagcaggaacctttttcacaaggtggcaagaagtgccaagtgaagtgggaagagccccttataaaaccatcagatcttgtgagaactcactatcacaagaatagcatggggggaactgctcccatgattcaattacctccaccttgtctgtcccttgacatgtggggattagggggattacaattcaagatgagatctgggtggaggcacaaagcctaactaactatatcaatcagtttgggaaagttatcttccaatccatgaacctgggacatttatatatttaggtttgcaatgcctttcaacaagctatttgtagttttcggtgaacaagtatagcccttcttttgttaaatttattcctacatatttcactctttttgatgcaattgtaaatggaattattttcttaatttcattttcaggttgttcagactgctagtgtacagaaacactggctttcctatgttgaacatatattctgcaaccttgctgacctcatttataagttctgataagtgattttttaaatgtgtaaattccttaagattttctaggtataaatcatgtcatccgtgactagagagttttgattcttcctttccgatctggatgccttatttcttttcttgcttaattgtcctggctcgtaacttccagtacaatgttggaatagacgtggcaagagcattcttgttttgttcccaaccttagcgggtaatgctgtggtttttcatcgatgctgtttatcaggttgaagcagcccccttccattcttattttctatcttgaaaaggtgctggattttgtccaatgctttttctgcatctgtaaatcattatgtggactttgtcctttattctattgatagggtgtattacattgacagatttttggatattaaaccaactttccattcctgcgataaatcccactttgtcagtgtacaatcctttttatatgttgctggatttgttttgccagttttttgaggatttttacatctatattcatatgatattgatctagttttttttgtggtagctttgttttggtatcaggtaatgctggcctcagggtgagttgggaaatgttctgccttatattttttgaaagatttcgtgatccagcactttgggaatctgacgggggcagatcacaagatcaggagtttgagatcagcccggccaacacagtaaaacgccgtctctactaaaaatacaaaaaattaaccagatgtggtggcaggcacctgtaatcctagctactgggaggctgaggcaagggaatcacttgaacccaggaggcggaggttgcagcaagccaagattgtgccactgcacaccagcccaggcaacagtgtgagactctgcgtcaaaaaaaaaaaaaaattgtgatggtgataattctgtaaaagtttggcaggattcacaagccttggctttcctttgttgaaagtttggttactgatttaatctgtttgtcctaggaatttctccattttatcaaggttcatctgttggcaaacaatccatggcactgatactttgtattctgtacagtcggctgtgccatcacctctttcattcttgattttagttatttgaacctatttttccttagacttgctaaagatgtgtcaattttgttgatcttttcaaagaatgaaccgttggttttgttgattttctctattatttttctattcatttatttctactctcatctttattatttcctttcttctgcttcctttgggtttagcttgcttttcttttagtttgaggtgagacagacaatctgcaataaatgtaattattgacacggttgttttcaacctactaccgttttgtatttgtccatctcgtaagttctctgttcccttttccttccttttcaggattcttagattaagtattccttagaactcttattttgtctcctacgttggctgtttatttctgtttcacatttttgtattgctttaaaggttcatacctaaaaattgcttaacacttttatatatgtttcacatctttaattcatcacaatctgccttcaagtaatagtgtaagaatcttgacagtatacttccattactcctttcttcggtgctgtgctattttcgtcatacattttatgtctatgtattattttaaacaatcttactacaaagaaacatgccaacagcatcaacattaccattctatttctatactttagacatacctcaaagggtcaggacactctagctcttggttagaaccctttttatgtggtttttcttttaggaaaattgcctggctttaagacaaggcatcctatatgtatttgttgaataaatttcaaccacccaaaaaaaaaaaacaaaacaaaaaaaaaaaaaatataccattaggagtataaattggtggaaaatctttctgcaacgttaatttgaaacatgtaccttgatcaagaaaatcacttctaaagattattctgggtgggcacagtggctcatgcctaatcccagcactttgggagaccaaggcaggaggatcacgtgaggtcaggaatttgagaccagcctggccaacatggtgaaaccccaactctattagaaatatgaaaaattagccaggtgtggtggtgggcacctgtaatcccagctactcaggaggctgaggcaggagaatcgcttgaacccaggaggtggaggttgcagtgagccgagatcacaccattgtactccagcctgggcaacaagagcgaaactccatctcaaaaaaataaacaaataaaagattattctaattaatcttcaactgcttccaaaggagccatggtatagaggctggaaaagtagcttttttttttttaacgtagtgaaatatgtatgatacattactaagcaaaaacctgagttaataatggcaaagtgggttacaatttttgcttaaaaaggtctttatgtacaggtagatgtacaagataaattaaaatactggatggacagtcatcaaattgtgagttatatctgggtaggaggattaaggatgactttttcaaattatgcatttgtatgttttttttcagtgagattatacttttgtaatgaagtacataacccaggggtttttcatctggatttagttgctggggaccttgggaagcccctcaggatctagagccagtttttccacctgaccagaggcccagtgatacctacctagcaaggctcagcagaccccctgcctgaacttgactccatttggactctgggaggatcctggccccaaaccaccctcccaagaacctccatgagttctctacctcttgtatccttctcttcccagcatcactgcaaatgttccaccctgtcccgcaccatgcccccatccatgagcacttagcatccttccctggtataggcaggagcaacgctgaacttcctggagaagtccacattccagtcagctgtctacagcagaaccacacaccaccaaagggaaatagcattttcatcactgactgcccaagggccaggctgctctccagaaagtctggaaactttccttgtcaacctttaggactggtggtttttaaatcttggataatcacataccatttctgatttgtcagtacagtttgacatttttatgaacacttgtgctgtatttttccttttaggatgacctttcctagacagtgtgtggggtagcttaagccccaccccttctcctgccatctcctccccaaggcaccaatgctgcctcctccactgtaacaccacgtgcttattcatctagaatcattcttactggtaatggaggccttccgtcctccggagtgactgtgtggaaacctgagccactcctcacctctaacacaagcctggcagcagctcctgatgagaccaggtgagcctcagtgagctcaggcgcctgcagatacggacattgaggctggcactggccagagctgtggtgggcatcactccccactgctgctgagcaaatgccctgaacacacctgtatctggttcctccttgccaggaactcattaagctgcctgggcctgtagtctcgtgctcctcccgctcggccagcagtgccacctgggagtcttgttacctgcaggttctcactcagcaagccaggacagggcccgagcacttgcatttctaaccaactcctgatgatgcagctggtctaccagccaccagctggctagcaagggtccagtcacagtttcagtgaaaggaagttccattcataaactatagaatttcagatgccttcaagtagaatcacctgatgaaatttaaaaattatttccaagctcaccctaacccggaaataaagattatcatcccaactaatttcaggaagggaggggccagttttaacatttccatttcaaatattagagcccggtctgtggctcatgtgtgtaatcccagcactttgagaggctgaggcgggaggactgcttgaagtcaggagtttaagaccagcctggtcaacagagggagaccctgtctttaaaaacatttaaaaaattaaaaattgggcagctgtggtgctgtgtgcctataaagctacaggtaattactttaaatatttcaacagataacttaaatactttaataatttaaatatttaaacagataattatctgttttagtttgtcaacattgtggtaagtcatgatcctgccactatactcctgcctgggcgacagggagatcctgggctctcaaaaaaacaacaaaaaaaaaaaattagaaaaatgaggccaggcatggtggctcacacctgttatcccagcactttgtaaggccaagatgggagaatcacttaaacccatgagtgacagaccagcctaggccacaaagtgagaccctgtctctacaaaaaatttaaatattagccagatgtgctggcatgcacctgtagtcccagctactcaggagggtgaggtgagaggatcgcttgagcccaggaggttgtggctgcaatgagttgtgatggtgccactgctcttcagcctgggcagcagagcaaaactcatcaacgatgaaactctttccaaaaaaaaagattagaaaagtgagtgaaatgggccgggtgcagtggctcacgcctgtaatcccagcactttgggaggccgaggtgggtggatcacgaggtcaggagatcgagaccatcttggctaacacggtgaaaccccgtctctactgaaaatacaaaaaaattagcctggcatggtggcggccgcctgtactcccagctacgtgggaggctgaggtaggagaatggcatgaacccaggaagtggagcttgcggtgagaggagatcacgccactgcgctcctgcctgggcaacagagggagactgtctcaaaaaaaaaaaagaaaaagaaaagaaaaaaagaaaagtgagtgaaatgacccaagactacacagtaagttactagagaaggtggtggcaccttagaagtatagagtttatgggaaaagttttaaatttttaatgaaaaagacttagaacaatgtattatttacatgtaaataagaaaagagagcagaatccccatatcctcttcaaaggaagggagacggcaggccatttatgagaagaaagtccatataaaccccattaagtagaatctggatctaaatacttccaaacaggagtacacagcaggtgaacagtctccctcatcccactgatctgctgcttcagataagatcagcaactgaaagtgaagaaagaaacagattaaggaacaacacaaacaaaatgaaaatttgttaacgtaaatttaactaaaacctcacaacagacttctcaaaacaaaaaacaggccagacatagtggctcacgcctgtaatcccagcactttgggaggctgaggtgggcagatcatttgaggccaggagttcgagaccagcctggccaacatggtgaaaccccgtctctactaaaaatacaaaaattagctggctatggtgcacgtgtctgtaattccagctactcaggaggctgaggcaggagaattgcttgaacccaggaggcagaggttgcagtgagccgaaatcgcgccactgcactccagcctgggtgacagagcgaaacttcgtctcaaaaacaaaacaaaaaaacccacaacaacaaaaaaacaaactcaggtgccccaaactaagaatagggaagttccctctacaattacagtagagctggacgatttcctaccgttcatcggcatctcatcaatctgagtggaatagtactgctcgatatctctgaggatgcggatgtcgtcattctttacaaagttaatggccacacccttccggccgtatcgacctgatctcccaattcttcaggaataaaataatattacagttagtatatataacaatcaagatttagtaaatgtgtcacagaagtgaagccaatgagagcttgcaccttacctgtgtatgtacaattctctgttattagggagatcatagttaatgatgagggacacctgagggacatccaaccccctggcccagacatctgtagaaataagcactcggctgcaaaaagaaagagtgtttgaggcgattaaattactcatacaagtgtaagactggacttgcttccattgctaattttaaggaatcctggctgcaggtccaaaatatacgagattctcctctctcaacagtctgtctgcaaacgtgaagcctcagggacagcaccagaaacccctgtgcagaggggctgttggtggatttagttacttcggtcatgtgctccatcagattaaaaaaatagacatcttttactagactatctttaacttgtttaatcggtcctaaaccaataattgggaaaaatacttcacttttgcctagcaaaaaattaaaaacggtaacttcagccgggcatggcggcggcttatgcctgtaatcccagcactgccagaggctgaggcagatggatcacctgaggtcaggagttcgagaccagcctggccaacatggtgaaaccccatctctactaaaaatgaaaaaaaaaaaaaaaaattagccattccagctactcgggaggctgagacacaggagtcacttgaaatcaggaggcagaggttgcagtgagccaagattgtgccactgcactccggcctgggtaacgaagtgagactgtctcaaaaacaaacaaacaaaaaaagacacacacagcacatatgttaagctgaccacaaggtgggcaaagaaggaagtctgaatcaagttcaaatgaatgaaaccacccaatccacgctttctgaccactgtggaattaaactaatcgaaacgatgaacagaaaacccccctacttactggaaaagaagacacacgcttgtaaccaaggtgaccaacctggctagttaaggctagttatcacctcaacctaagtattacaggagcacagcggacccctccttaactggaaggttttctgctcacccagggcctcagctttcagagcagaagcttggcatccccccgggtgtggggcctgcacttaggcggtacatatgaagtgcttagacacagtctagcaaaccctgacctgcagagccacagcatagcagacccacctggcgcccgaccggaactccttcatgatggactcccgctctttctggggcatgtctccatgcattgaggatacagtgaagttggcttccctcattttctccgtcagccagtccacctacaaatccaatcaacagatgctactgcaagctagtataccaaagcagagatgtgcattcgggactttaccgcatcatttgcagaaccagtatcaatattcgtaaggtaactgctcttaaaactcagaatcatcctaactggatgtaaaaactttttcccagaaaatgttggggtgcactcacaaaaccctcttacttcattttctccatataatgactctatggggggagggggccaggtgtgctcattctcatttgaaatttgaattccaatcttgttagaatgtagcccaactcctttcctttctcaggaaagtggccgacagttctcaggtctgcctccacattaccatcacctggggatctaaaactactcaggcctgggttccaccttcagccaacgaaatctgaatctttaggggtggctgatatcgctgttctgtaaatgaagttttaatggtcacagccacgtctgaccgtttgcatattgtctacagctgcttttacaagagaacacataccctgaaagcttaaaatatggacaaactggccctttactgaaaaatcttgatttatgtcattcagagactcaatctgcagtttcccttcagcacatggatgctgtgcagtgcctcttacctttcttttggtgttgcagaagatgaccgcctgagtgatggtcagtgtgtcgtagaggtcacacagagtgtcaaatttccactcttccctctccactgccacgaaaaattgcttgatgccttccagagtcaattcatcactgaaggacaaagacaaatcctgttacatactcatccttccttctaggacttgagggtgggccaagccaggatccagggagaccctggtggaaaaggtcacaccgtgatatctggtgcagacccagcagccccagccctgtcctccatcctatcaccacttccgtcacacaggcctccattctgtatcctacttaacatttcacaatgtgcaccacatggaatacgattctaaacgaaacactgataaataaatagtcacctaatttttaaatttagaattattggttcaaaccacaatgaggattataaaagatgggttgttttgttttgtttgagacagggtcttgctctgttgccctggctgaagtacagtggcacaatcaaagctcactgcagcctcagcctcctgacctcaagcgatcctcccaccacagcctcctgagtagctgggactataggcatgtgccgccctacctggctaattttttattattggtagagatacggtctctatatgttgcccagcctatttggttttttaaaacaggaattttaaaagaatttgcatgctttcaattcctttacactcaggcaagaggatagcctgaggtccgggttttgacacgagcttcagcaacacagccagactctggctataaaaagtttttgaaattacgacataaaatcctttataaatgcggcccagtgttttagtaaacttgacaagaggggctcctaccgtttcaccaagatgcggattgggtcggtcatgaacttgttggtcatctccagaatctcgtgtggcagcgtggcactgatgagaaccacctgtgtggctggaggcaggtacctgtatacatcgtaaatctgctctttgaaacctgggacagggagcaagacaggtgagggatgtttagggcggcacacccagaaatggaaggtgcacgcccagtgttcccactgggttagaggcagagtggtgataaggtacgtttgacaggaaatctcatttttacagcaccaggccacatccacgcgttctctccgtccctactccccgcccaccggagtgttatctggttgagggaatctggtttccctttggtgcttcttcaatctgaagtgatctagggatcaagaaacccaccccgagagtcctagataccaaataaaaagcaatagaggctggcctgagtcacccacaatgaacaaataaataaaatcaaggtaggaattttttgttcataattgccaaggcacaattgtttttccacgatgaaaacactattcacattcagaacagtcactggctgtttcaattttacactgtgaaaatttaagaactaagaattatgtcagtagaagagtaattcttttgttgctcatacctttattcaacatttcatcagcttcatccaaaaccaacattttgatagcacgtgtccttaggcttctgcgacgaatcatatctataacatgagattttgaaatacttacgacaaatcacatctatgagattttgaaataatcacacctgaggctcccaagaaagagctcatcattccactggtctcagggttccagagaccttccctctacctcctgcaagtgacccaggtgcaaaagtctaccgtgcggcctaccaaatcgaaagctgtcctgtaccatttaagcacttcttacaaatactaccggcagcaccatttttagcgacaaaagtgcttaccaaaaacacgccctggagtgcccgcgacaacatgctgtccgtaatccagcttcctgatgtcctcgccaacattggtgcctccaatgcaggcatggcactggacattcatgtagtcaccgagagcaagcagcccctgaaacaaagcacaggttcacgtccagggtgggagagagaaacatccacgttttccaaaaagaaagactgtttctcctccgagatgatcaccgattattatttatgccattattatctcgaaaccacaaaattctcctgctcttttctctgacaaaaacaagttaattttgcttttttttttttttttttgagacggagtctcactctgtggcccatgctggggggcagcagcgcaatcttagctcactgcaagctccgcctccagggttcacgccattctcccgcctcagcttcctgagtagctgggactacaggcgcccgccaccacaccaggctaattttgtttttgtatttttagtagagatggggtttcaccgtgttagcacaccgtgctgtgtgcaccctatatgtgtattcagagagtcgttatctcctgacctcgtaattggcctgcctcagcctctcaaagtgctgggattacaggcgtgagccaccacacccggcctgctggtttcttattacaaaagctatatcattaacagaaaagaatatataaaattcataatcccatccaccgaagaaaccagcattaacatcttaatatacatctttttaaacatacatctttatactacgttaagtataaaatgggtacaatttattttttttttgagacagagtttcactcttcttgcccagactagagtacaacggcacaatctcagctcactgcaacctctgcctcccgggttcaagtgattctcctgctcagccacccaagtagctgggattacaggcgcctgccaccacgcccagctaattttttgtatttttagtagagacagggtttcactatgttgaccaggctggtctcaaactcctgacctcaggtgatccacccacctcgacctaatttatttttattaaaattgatttttcgcaaaaaatctacatttctaaggctgtaaaaaactaccgagagcacacaagccacaccaaaaatgacttaatacaaaccagcaatttatataatgattaatggcaaaatgttaatcaggaagaaaattttgaggtatcagaaaacaggattggattaaataaataagtcggtgtttcacaactaaatcacaaaagcagtacttgttaatcggacaccgctatctttagccatctcaccttctggatctgcacagccaactctcttgtgggagccaagatcaaagcttgagtttcacgaacctggtgaaataatttatcagaaaatagagaatccgcagtattatcaaagtggattgtagtaattcacactcagatctatatgagaaatactatctcatattaatcatacttctcatctcttacaggttagcaaatattgtcatttaaattgcaaatccaacaataacttaatgtgtcagcatcctcgtctgcagacaagagcttcctctagttaaatagaaaatcatgacagaatattagtgcatatattagtgtacaactaagactctgtgtaaaaatttgctgagtcaatacatactagaaaattttaaattgtactttttgaacactgtagttacagaagaaaaagcaagtatttcctagaattacataacagtttgttttaagaatggcaaattacctgaatatccaaacactggaggactgagatactgaaggtggctgtttttcctgtgccggactgagacctattcaaggaaacaaaagcagtgggattagagggaggacaggccacgccacagctgcactccaaggcctgggctccagaggcacttaggtaccttcttccagcaagcccccgtacctaataacatcttaactgcgaggaggcaggactcgggcccagtgtcacagcttgttaagtgtccatgaagaaagagagtagacatggcttctgcacgggggcaatggagccacagactctctaacttcaagaggtgtttcataggtgtcagaaaaaggaggactcccctttatctaaatacaactcttttccttctaggattttggactaactctctcttccaaagaaatttttgtgtaaatgagtcttttttgaaattaggcaaacgaggaataaagctattaaaagaggatttgtggtgctaggagatatggctatatacaagttttcatccatagttcctggctcacagctcccatagcccttattacagtcttattaaattgatgggttaggcctcaggaaacaatctctctgaccttctgctctcctttcacctgctccacagcagggctctaatcttccctgcctttcagattgtgagtcataaagaccctcatgtcacggcgtggtggctcaggcctgtattcccaacactctgggacgcagaggcagcattaattgaagccaggaattcgagaccagcctgggcaatacagcaagagaccccatttctaaacaaaacaaaaaactaaccaggaacggtggcacattctggcagtcccagctacttgggaggttgaggcgggacgattccttaatcctcgaagttagaggttgcagtgagctatgactgcaccactgcattcccgcctgggtgacgaagtgaggccccatatcttaacaaaaaaaatgtttaggccgggcacagtggctcacgcctgtaatcccaaggctttgggaagccaaggcagacagattgccaggagtttgagagcagcctgggcaacacaacaaaaccctgtctctacagaaaatacaaaaattaattgggcatggtgatgtgtgcctgtagtcccagctacttgggagggtgaggtgggaggatcgcttgaggctgctatgagctgtaatcacacgactgcactccagtctgggagacagagtaagaccctgtctcgaaaaatgtaaaaaatttaaatttcaaatttttttttaaaaagcattatggtattatcccagaaaagctcctgccctattcccttatgggggaaagaatgctgacctcatggaattttccataaaaacccaagaggactgggttcgaagagcttctagatggctgaacacagacagtggaacacaaggaggttccgggaggtgaccacccgccccttggaggctgcacccctccccccatatctgtatcctctgcagtaccctttataataaaccactaaatgtgtttccctgagttctttgagctgctgttccagcaaattaatccaacctaaagaggggatcctgggaacccaacttgaagctgcttggtcagaagttctagagatccgaacttataactggtgtctgaaaagagggtagtcatggggactgagccgtcaacctgcaggatatggcctatctccaggcaggtggtgtgagttgaactggaggacacccagctggaaaagccccacacctctgctcacagaagtcttcttctgtgctgatgactgttgtggtggtgtgagagcagaggaaaagcacagtctgtttttccgaaattgtgttatatacaattccacatgccagcaaaccactaagcaaagctggctaagaaaatgaaagccttggccgggcgcagtaactcatgcctgaaatcccagcactttaggaggccaaggagggtggatcacctgaggtcaggagtttgagaccagcctgaccaacatggtgaaacccccgtctctactaaaaatatgaaaattagtcgggcatggtggtgcatgcctgtaatcccagctacttgggagggtgaggcaggagaatagcttgaaactgagaggcaaaggttgcagtgagccgagatggcaccactgcactccagcctgggcaacagagcgagactccatctcaaaaagaaaatgaaagctttccacagtagagaacacaaatttaaaaaagtattaaaccctgtggctaaagtcagggaaagtgttggaactgagcgtgtacaagctgagggaaacagtcatcccagagcatctaactgcactgcgctgcccaaatttacatccagccctgcgccgcaccccaggacaacttactgtgcgatgacatctctccctttgatgatctgcttgattgctcgttgctggattgctgatggtttttcaaaacctgcaaataaaaacaaaaaattagccctcaccacaatgacagcatagaaaccctgtactgtgagctcctcaggggcagacatggtttgttttttgaacctgtcctccagcctaacccagtgttcaacatagcaagctctcaaaacccaggggctcaatgaattgggctgagtgatttctacactaacgtgggatattatttgtaaagaccaatctctatttttaaaaaaccaccaaattgtagaatatagacaacagttttgtttaaaaaaaaaaaaaaatctgggtgtgcagcatctggaagtgtaagtgccaaaatgttcctggcagttactgcagtagaggggtggaaagaaacttactttttactctaattactcccttaggtttgactggattacaaacaacctatactactttttaaattaaaaaaaaaaacaacaaaaaaacaggaaagtcactctagccattgttctctcctactagctagcattaagtctgtgtgttgctgacaggtctacaactctgtttaacctgcgtgggtcacgctgcagggtgtcctatgttgttctgtctggatgcagctcactaactacaacaccatcacaccatctctcttgcaaagcaactactacaccaaagggtgaggctattttgaagaagaaccacgtgtttttcaagtaaataaaattttatgtacaaaaactctatttcaattattttttggtagtctcttaaatgtagctctgctcagttctggggcatagcgaaaaataagaaacaaaagaaaatgtagcacaatttcccatcttaacacaaatgcaaatatagcagatgatttaaactcttcatgaagagcaagcacatagatgggaaactaacaacagtgtcttagggcagggactgcctgagtgccaggaaaccaggtggggctgtcagcctcactgtgaggctgcctgagatgctttttcaccacgcatcctcagcaacttcgcttcactttgtccaaactgttgtggcatcaagaactacaggatacggccaggtggggtggctcacacctgtaatgccatcactttgggaggctgaggctggtggatcactgaggtcaggagttcaagaccagcctgggcaacatggcaaaatcccctccctactaaaaatacaaaaattagtaggacgtggtggcccacacctataatcccagctactcgggaggctgaggcaaaggaatcgcttgagccccagaagtggaagttgcaataagctgagatcatgccactacactccagccttggtgacaagagcaggactgtcagaaggaaaaggaagaaagaaaaggaagagaactacaggataaaaaatgtccctgtcccaagcattaaacacaggccatttatcccagatgctggtcattcccatctatgtgcccaacccaacctcttctccaggctctccctcaacttcctcacatctttcaaacataccaagagacagctcctgattctgactctctggagtgctgcctacctagccaaatgtttgcagcatcaaccaccggttactcaaaacactccaactctcctccttctgtcactcacgttcaatccatcagccaatgctgtcagctccctggtactccatctccaaggcagcacaatcctctcttccctgaactgcagcaaaagctcccaactctcttgtttcctctcctgccttgcctcgcctcacctcaaatctacagacacccagaagaatctttaaaactgtaaatgtgatcgtgtcacatagctacttaaaaccttccactggcttcccactagatttctaaatgaaattcaaattattcgtcaccctacacgtctttgctagatctgccccgactagctctccaaaatcccaccacaggggacttctttcagttcctggaatgcagctggctaagggctgcaaggccctggcaccagctgttccttctgccccaactgctcttccctcttctcataacagtctccttcatccagaactctgctcaaatggcaccccctcctgcgaacccccttacctctctgctttactaattctctcctccttcccagtcccactctattcaattaccccgcttcaggttcttcaggttgcctgggcaacctgacagtatgctttccccccaaacgaaattcaaaacccgtaaaggcgcaaacccttccggtttaccgccaaaaccccagtacctagaaaagctaataggtagaaatcagttatctgctgaatgaaggacgctgaggtgcctcgaagcggctgcagcccccgacagacccagcgccgagctctgcacgggggacacacaccgaaagcgccgacacagccaggcgtgagggcgaggacgggggtgggggtgggggtcggacgtcactggcccccgagcctcgaccctgaccacgacctccggagcgcagggccggcccgggagtcaccagtctggccctcagcccccggctcgcccccgactcgcccccggctggcccccgcggcccgcgcccgctcaccgtaagcgtagatgccccgcagcaggtcctcccgcaggcccatggtgtcgaacgtgggggtcacatccacctcctcgctggtctcgaattccactttagtcatgtcttcctctttgagcagccgctttcgcgccgagcccgaggtcgccatcgtggccgtggtcgccatgattcagagtccgcggaagagcacagcgcgcgccgctgccgacctcgctgccgctgccgacctcgctgtgccgctgccgacctcgctgccgctgccgacctcgctgtgccgctgccgacctcgctgtgccgctgccgacctcgctgtgccgctgccgacctcgctgtgccgctgccgagaacagacgccttaagtatgcgaaagcgagagacgtgcgtgcgtacgtgcgtacgtgcgtacgcgcgacgcggccacgcctctgggggacggggcactcttcgtcacgtgaaagggaactgggcgtttgccgcagggaaaagtaaggtgtttctgctctcgcgccatatgcagttcccgcgggatctcgttgagggcggggcacccagttccttacgaaagggatggagggggtggtacttctaaagttggcggtgtttcgtaccggccgcgggatttcgcggactggggcgctgaggttctttgagcggcgtgtggacctgaattccctggaaacaggctggggccgcgaggggcctccgctccgggcggggtccccagatagccccgcctcgaataaaaatgacgagcacgggtcctctctcgggcccgcagtgggtggactgcgtcgcagacccgtagtggaggcgcccagctcgccggggagattcgagtggaaaccctcacggccgccggtggtgggccccggcgcggcgctgggctccggcgggtctgcgctggggagggccagggcccctgaagccggcgtccctcttaggggacgcgcctgggtgtgtcttcaccgtttgcctggtgagttggagacagggtctcgctccgtcgcccaggctggagtgcagtggtaggatcagggttcattgtagcctccgcctcagcctctggagtagctgggacctcaggcgcgcgccaccacgcccggctaattttttaaatttttttgtagagacggggttgggggaggcgggggttagggttgtcctggctggtcttgaactgcggggcctcaggtgatccgcctgccttggcctcccaaagtgctgggattacaggcatgagccactgtgcccggcaagcagctgttataaataaaatacatgctgagcctgcaatttgctcttaatgaaggccacttgtcagtagacggtgctgctaatgcgtgtcctgcagcaaagataacccagacgggatcattttttaattgcccagcagaactttaaccagttgtgcatcttaacctgctttttgtttgttcgtttgtttgttttgagacagtctggccctgtcgcccaggctggagtgccatggcgcgatctcggttcactgcagcctccacctcccgagcacaggcgatcctcccgcctcagcctccagagcacctgggaccacaggtgtccacgcgcagccactaaccgctttcttatctgacactttaagtgcttcttcgtacccagctcctctaacgccttttgaagcagctccatcatctttgaagggcagttcatgctgttgagaatcatgtttttaactttgggaaaattgtatttccacgagcgccagctctgtccttttttttttttttttttttttttttttttgacggagtcttgctcggttcgcccaggctggagtgcagtgtcgcgatctcagctcactgcaagttctgtcgcccaggttcacgccattctcctgcctcagcctcccaaatagctgggactacagacacgcgccaccacgcccagctaattttctgtatttttagtatagaccgggtttcaccatgttggccaggatggtcttgatctcttgacctcatgatccgcccacctcggcttcccaaagtgctaggattacaggcgtgagccaccgcgccccgctattttgtgtgtgtgtgtgtgtgtgtgtgtgtgtgtgtgtgacagagtctcgctctgttccccaggctggagtgcagtggcgcaatcttggctcactgcaacctctgcctcccggttcaagcgactccccttcctcaccctcctgagtagctaggattacaggcatgcaccaccacgcccggctaatttttgtatttttagtagagatggggtttccccgtgttggtcaggctggtcttgaactcctgacctcatgatctgcccgcttcagcctcctaaaatgctgggattacaggcatgagcccggtcctgtcctttcttatggtcacaaatctggcttgcatcgctgggcacatctttaatccacagcttctttctaggagtgcttgaaaagctctccttttatgaaggttaattttagttaaaaccagagcatcctggccaggcctggtggctcacgcctgtaatcccagcactttgggaggccgaggcagacggatcatgagtgtaggagttcgagaacagcctggccaaaatggtgaaaccccatctctactaaaaaaaaaatacaaaaattagctggccgtggtgacgggtgtctgtagtcccagctactctggaggctgaggcaggagaatctcctgaaccccggaggtggaggttgcagtgaaccgagattgcgccactgcactccagcctgggcgacagagactccatctcaaaaataaacagaaaaccagagcatccttttatcaagaagtcggtggattgcagtatttcaagggtgaacaagtaaatgcagccttctccaagagtgaatctcattctggcaccagaatttatccatgacagataattgaccttctgataaacattccttgtaaggatgctggtgttacccaaaatattaaatatttataaagctgaataaaatgtaagttctgataccttcctcactctacaaaggatcatttcgtgcctcacactgtttgccaggccgtgctgtagcgctttgtcgtaaaatacacacagatttcaatgacttaacgtaggagaagaatgtaaaataccttgttgactaaagaaaaacagttaagcttttaaagaattaaagttagttttattcagaagccttactgaggaccgtacatcctggccccagcccaggagctcaagcgatcctcctacctcagcctctcaaagtgctggaatcacaggtgtgagctaccaggcctctcaccttgttcaaagttaaaatctaatccacaaactgcttagatttgttttccttcatatttttatgactagatgatctaacattttacaccatttttctggaaatgttgtttatgccaggtgtctgaacacacatcttaaagggctctaacttttctggggagcagtagctttttagcccagagtctatgacaatgtgacaatgatgagagctgctgaggtttgctgcagtctctgggtgaacgatgctttctagggaaacaatggggcataaaacagacatgggctctcctgccttgagattaatcgcgtgagatggacccctccccaacacacaaacattgtgggacatgaggtgctggagacggggttgctcacccagagcttaatgggtctgtccacctttgtgaccaagaggcctcttttcttagaggctgaggggccctgggatgatgagggtaaatccactttttagagcaggaatctccaaaccccaggccacggaccagtatcagcacctgtctgtggcctgttaggaaccaggcggtgcagcaggaggcaagcaagggagctaaactgagctctgcctgctgtcagcagcagcactggactcagaggagtgtgaaccctgttgtgaactgcacatgcgagggatctaggttgtgcactcctcatgagaatctaatgcctgatgatgggaggtggaatagtttcatcccgaaaccactaccccatccatctctggaagaatttttttccaccacctgtggaaaagttgttgacgtggctagactttgtgtcttcacccacatctcatcttgaattgtaatcccataatccctataatccccacgtgtcgagggagaagccaggtggagtaattgaatcacggggatgagtcccccatgctgttgtcttgatagttgtctcgagatctgatggttttataaggggctcttccccctttgcttggcacttttcccttcctgccatcttgtgaagaaggtgccttgcttccccttcacctcctgccatgattgtaagtttcctgaggcctcccaagccatgctgaactgtcaattaaacctctttcctttataaataacccagtctcggacagttctttatagcagtatgaaaatggaataatacatttgtcttccacaaaacccatccctgttgccaaaaaggctttagaaaacgcagtgtgggtaggtggtgaatagatgggaggagactcatgtttttgtcatgtaggagagcagcaagagctcctctcaggagaagaggtttttgctgtgaaatatggtgcgtgcttttccatggcctatgtagtgctcagcagatgccctagcatcaataggatcccaaaccccttgttctgtttattactggtaggcagttaggatcgtgtcagccatgtcttgagaacatgccttgtgagtcatgcaccagatttgttaaagtgtcggctctgtgtagctctgttgtgctatgcataacatctacttaaaaaatgagagctgacagcctcgcttagctttctatccacaagtcccctgcttaaaattctggataaatgtttccgttcctatgggaaacctccattatctccataagtagagaatgcagataggtatcttttttcttttactgatggagacactaaggcccagtgtgataagttcaagcgccctacagggaaaggcacaagcaggccaggctctagagttccctaaacagtagctatagtgcctgccctttgtccctggcccccaaggtgtctaggaaaagaggctcccggtcactgaggtagacagacccctatgcctggtctcagcatcctcgctgtcaccggcatctcacttcccacatggtttccacgttggggagggagactactcaccccattaaatgcggctgctagggtcatgtctgtttcgcccccactgtttccctaatgctcagtaggtgttcaataaatagttgttggcttactcaatgtgtggacctctggggcaagagagagggagggacacaacgcagtcccagctggccaggagcgctgtgagctcaggaggttgctgtgggggagatggtgaggtaggaatttggcaggacttgtttcacaagatagaggtcacaaagacccgctgataaaacaggatgtggtaaagaagcctccaaactccaccaaaagcaggatggtgatgaaagcagcctccgcctgtcctcactgctccttatatgctaattataacgcatcagctgccaaaagacactcccaccagccatgacagtctccaaatgctatggccacccctgaaagttaccctatgtggtctgaaacagggaggaaccctcagttccgggaattgcccacccctttcctggaaaactcatgaacagtccacccctttttagcatacgattaagaaattaccataaaagccaactggcacccctcagggctgctctgcctatgacgtagtcacgcttttattcctttacttccttcataaacctgttttcacttcattctgttggctcacttttgagttccttcccgtgggaagccaggaacccacgtggtctcacaggctgagtcctactttgggggtttgccctgtgacaatgggaacagcccagtggtctgccaccctccagagccgacctgtcccttttcctttaccttcatcggctcccaggaatcaggtagaaaagggtgaggtggcttttcttgcccaggaggctcaggggcagtgctgctgggctgcactgggttcctgtaactcatcactgcaggagttgatgtcctagatagaagtgacctcgatctgatccaagggaccatcccctaaaagtgacttcctgccagaagtctccacccatccgtaggtattaaagggtgaacactgttcatttctaggcacagccctgcctaaacccaactggctggggcaaggcaccttgctgagcgctgcctgaactcacctcactgctgtcttgactctcagaccctgcactggctggtcagagtctagcacacgtgcagtgttaacagaaaaaccagaccctgtaaaaatgttttcaagagggttattctgaaccagtagaagtgactgtggcctggaaaaaacacaaacccaaaaagccttaagtggtcacaaggtacccaggtaacagtttctgtcaggcctctgagcccaagctaagccaccatatccccagggacctgcacatgtacatccagatggcctgaagcaaccgaagatacacaaaagaagtgaaaatagccttaactgatgacattccaccattgtgatttgtttctgccccacactaactgatcaatgtactttgtaatctcccctacccttaagaagtttctttataatctcccacacccttaagaaggttctttgtaattctccccacccttgagaatgtactttgtgagatcctccccctgccctccaaaacattgctcttaactccaccgcctatcccaaaacctataagaactaatgataatcccaccacctttgctgactctctttttggactcagcctgcctgcacccaggtgaaataagcagccgtgttgctcacacaaagcctgtttggtggtctcttcacaaggacacgtgagacagtttccttttttttttttttttttgagatggagtttcactcttgttgcccaggctggagtgcagtggcacaatctcagctcaccacaacctctgcttcccaggttcaagcgattctcctgcctcaggctcccaagtagctgggattacaggcgtgcagtaccacgcctggctaattttttctatttagtagagatggggtttcaccatgttggtcacgctggtctcaaactcctgacctcaggtgatctacccgccttggcctcccaaagtgctgggattacaggcagtagccactgtgcctggctggtaacagtttacttttatacattttaggtaaacaggagttacaggcaaagatgtaagtcagtgcatggaaggtatacgtttggttcagcctgaacggcaggctatcccagagcaggggcttacaagtcatacgtgggttttacagattctttacttgccatttgagagagttaagctattatttatattacgttttgggggagtcaaaaagagttaagctaccgtctaaagacctgaagtaagtagaaaagaatgcttgagttaaggcagttgtgggggtgaaggcccttgttatgtaaatgaaagcctcataggtttctagcagccctccgagaaaatggatggcaaatgtctcttttcagactttaaaggtgtcaagctgtcagcaaatctctcctagatccaggcaaggcctggatatgttaatggacattctctacagatgcaaattaatttcccccacaaaagatagctttttttttttttttgagatggagtctcgctctgttgcccaggctggactgcagtggcacaatctcggctcactgcaagctccgcctcccaggttcacgccattctcctgcctcagcctcccgagtagctgggactacaggcgcctgccactgtgcccggctacttttttgtattttttagtagagacggggtttcaccgtgttagccaggatggtctcaatctcctgaccttatgatccacctgcctcagcctcccaaagtgctgggattacaggcgtgagttcaccgcgcccagccgaaagacagctttgcagtgccattccaaaatatgtcaaagaaatatatttcacagaaaaatatttttatttccattctgtcatgtgtgctcatccagaaccagtttggaaaggaagccacattgtaccaggttaattaaaaaaaaaaaaagtttgacaagggtttatggttagtagggtgtgaatcagcctttgcctgccatggccttaggtcttgtttataatttggtatcttattgccacaaagagtctgtttgatcaatcttatctctattttaacctaaaagaaaaacttcagcctgttgcaggaagccagggaccccgaatggagggaccagctgaagccacagcagaagaacataaattgtgaagatttcatggacatttattaattccccaaattaatacttttataatttcttacgcctatctttactgcagtctctgaacataaattgtgaagatttcatggacatcacttccccaatcaatactgttataatctcctatacctgtctttactttaatcccttaatgccatcatcttcataagctgaggatgtctgtcccctcaggaccctgtgatgattgcgttaactgcacaaattgtttgtaaaacgtgtgtttgaacaatacgaaatctgggcatcctaaaaaagaacagggtaacagtgactttcagggaacaaggaagataaccataaggtctgactgcctgcggggccgggcagaacagagtcatatttttcttcttgcagagagcaaataggagaaatattgctgaattcttttcccagcaaggaataaccctggaaaaggaatgcattcccagggggaggcctctaaaatggccactctgggagtgtctgttttatgtggttgaagataagggatgaaatacaccttggtctcctgtagtgccctcaggcttgctaggattaggaaattccagcctggcaaattgtagtcagaccggttgtctgctctcaaaccctgtttcctgttaagatgtttgtcaagacaatgcatgcccagtgggacatggaacctcatcagtaattctgatttcaccctggccttgtgatcttgctctgcccttctgcccttgtgatcttttattgccctttgaagcatgtgatctttgtgacttactccttgttcgtaccccctccccttttgaaacccctaataaaaactttctggttttgtggctcaaggagcatcacggaatctaccaataggtgatgtcaccccccagaggcccagctgtaaaatttctgtcttttgtactctttctctttatttctcagaccagccaatacttagggaaaatagaaaagaacctacgttgaaatatttattggaggctggttcccctgatagtatgagcttcagcttgcaaggcctcagggaaaatgtggtagcaatttcattcagtccacatcagaaagatggaagaagattttgaaaatgttagtttggagatttgtagccagataagaatggaggattcatcacaaattgtagaaaataataaaaactgaaaaaacaatggacaaggctggaaactaacaacaagtgaactatagtattctttctttaaaaaaattattgtagggaagaagtcttgctatgtcacccaagctggtattgaacttctggccccaagcaatcctcccacccagcctgtagttttcttttgaaacataatttttctgtctccagtttcccattgttatcaagaagaaatcatagtaagaccaatatattggtaaaataagttttagtcttattacacttggcccgattatttgcataaagtatagtaaaaatagtaattggccatataggctcttttaagttgcttttgctggaactttttataaggttagactatttatttaatctctctgtctctctctcttttagacagagttttactctgtcacccaggctggagtgcagtggcatgatcttagctcactgcaacctctgcctcccaggctcaagtgatcctcccacctctacctcccaagtagctgggactacaggcgcatgccaccacacctgagtattttttgtatttttggtacagatagggttttgccatgttgctcagactggtctcaaactcctgacctcaggagatctgcccacctcagcctcccaaagtgctggtattacgggcatgagccactgcacctggccttatttatttttgatgcagggtctcactctgttgcccaggctggagtgtagtggtgtgatcatagctcacaatgaccttgaacgcctatgctcaagtggtcttccaacctcagtctcccaagtagcttggatgagagaaacatatcattacactgggctttgttgttgttgttgttgttttgagagatggagtcttactatgttgcacagtctggttttgaactcctggcctcaagcaatcctcctgccttgatctcccaaagtattgggattacaggcttgagctaccatgactggccaaggtcagactttgtaaaagcctcttgagccaagccaaggatttatctgtgcctgcagatacctgtatgagttgggagccaagccaaggatttatctgtgcctacagatacctgtataagttggatgacttattctagaggtctcaaaatatattttgagattcctgggcctaatcagaaaatgacattctttacttaacacaggtcaggaagcttgcaggggaaccactgagtcaaggtaccaggccagtcttttcaactgtctttttttcagctctataagttaacctcaattcctcaaaacagtccagtcatatctaaaatatgccattctagtcaatgccttggtaaaataatcagtgtctccaactgtgtcctgttatgaaagacaacagattcttactgaccttatgcaaataactatattgccataaattaggaatactcacaaatagttttcaaacttggagacatcagatgaagagaaagaaatatgcttcaaattttgctcacaagaatatacttcactcaattgttaaaagctataaatagctcaaaagaaaatagtttgtcaaatatcaaaggtttaaaacacttcatatcacaaaataggatcataggtcactgtaaaatggtcattgagccacaatgataattgaaatacttcaaaaagcaaaaattatatactctttaatagagtcagtttcccaaacaatcataaacctaataaattcaggctgggcacggtggctcatgcctgtaataccggcactttgggaggctgaggccagtggatcacctgaggtcaggagttcgagaccagcctgggcaacagggcgaaaccccatctctactgaaattacaaaaattggccaagcgtggtggtgcatgcctgtaatcccagctactcaggaagctgaggcaggagaatcacttgaacctgggaggtggaggttgcagtgagccaagattatgccacagtactccagcctaggtgacagagcaagactccatctgaaaaaaaattcaaaagccaaaaaactaataaatgcagcatgaggccactgaatctgtctgcctccctcacctattttgttttgttttttgaagtttactcaaaaggtaaacaaacatcgtgtactcttattacacaaaaattttgttgaaaaaggaaaccaaattttacatttgcattagtgttttattaataataaagctaattttaataaaattttataaacaaatccatccattcttaaccagtttgaccacaagatttttataaaccttttataacctttgacaattttccattttctttttcaactttctatatacatttagttttatctatcatttttaaattccctcagtgtaaaacttaactaggcaaaattaatatccctttaacaaaaactacaatggtatggcttcttataacctcctttactaaaaacacgttttactttcctcatatattttgcatatagaaatgtttttcttatatctagtagttttatttacttatttatttttgagacggagtctcactgtgtagcccaggctggagttttaattacatatattaattatgatgtgaactcttagtaacacttatttttagagaaaaacctggaaggtcagcaattttaataatgtgctggatgcagagcccaggacaaaggacagtgcctgcagctatgcctccacatggctgaggtgggacgattgcttgagcccaggaaacaaagattgcagtgagccaagatctcaccactgaactctcacctgggtgacagaaaaagactctgtttcaaaaaattaaaataataagcaacagttttatgactttaaaacatttaggtgacagaatctgaccaaacagaccattagacttagacaaaaatgtctaagttaaattctgaagacattttactgtcctgttttaccaatagtttagaaccctatttaccaaagattgctagagtcacctgaactagaactcatttgagttaacgtttctgtttttctgataaaatatttgatttaagtgcttaccttttccttaagccaattaattagagctctttcatgtattttggtagtgaaacatgacatacacatgacatacgtaaacacatagacatacaaacacacaaacagaagcagatcttatagactcataagattcttcatttgccatttttcaaatagtttctctccctcacttcagactattaatctcttaactgtttcatgccctaaacaattgtgagggaactgtaaattttcatctccaaaaacatgactcggcaggttgaggcaggagaatcaggcagggaggttgcagtgagcagagatggcggcagtacagtccagctttggctcggcatcagagggagaccgtggaaagagagggagagggagaccatggggagagggagacggagagggagacggagagggagagggagagggagagggagagggcctgtttcttaattagatgactagataaattagattaccctgaagagtagagccctttaatgaaaagaggaaagaaagcatggtgtttttagggcctaatctttaaatacgcataaagcaggcacagctggaaggcagagcacagatcctccaaaatcaaagatcccatttttacaccaaatcctgggtcccagaaagaagagagcagtgtgggactggccggtgcaatgctcccacggtacatttcatctcctcacaggactgaaaggtgtgatcctcccacggtgcatttcatctcggcacgggactggacggcgtgatgctcccacggtacatttcatctcctcacaggactgaacggtgtgatcctcccacggtacatttcatctcagcacgggactggacggcgtgatgctcccacagtgcatttcattttgtcatgggactggacagtacagtgcatttgatttcagcacaggactggaccgggcaatacccccacagtgcatttcattttgtcatgggacgggatggtgtgatgctccccacagtgcatttcattgtaaggacattccctggaggctggtgggcaacccagagctctaactcaacagtagagtaggttagttgctggccacttgcagagtccaattatttagaatgaggcctggcacaaataaggttatttattccaaaggtagcttggggaagtggcacaggcatctgtcttgcatttagctgtcccactttgcttttggaacagaaagtgggcacttctaaaagacaggggaggaagtgagcaggggcaggagtgggttcatgctagctccagtgccttatcaggtggtcgagcttgtgactgctggcacttttgtgggcagaccattatctctccaggccactccctgatgggggagttccatagcaggcatgctttggtctgtaaatcaactgttaactctccaggagttagatgcacttgccgggggatctcgagggactgtctggtgaaggaggggagaaaaggctagatttgcatacctaaagggctaagtaggaagtcaggaactgggaaaaggagaaaaaaagagaggaaaaaaataattaaacatcttttagaaaaatgggggtactcggaaacaaagccagttatcccaatctgtggtcagcctatcgcccgtggagtcgtatcccttggtgggctgtgttttcatagcctctaggtaacacaggcacacctcaaaattggggcttagcctgagagagttcttggctttgctcaggaaataatttaagagcagggctaacccacagggagaggctagagtagcagtaaacagcagcaggaggaggagcagcagcagcagcaggggcagccacagctgcaacaagggagcactggctagccacaattacacccggtcttaattatatgctaatcaaggggtgggctattctgaattttctagaaaagaagtaggggagttctggaaccatgtagggtattgccatggcatttataggctgtcatagtgccgtaaggaaggtcttcatgctgatgagcagtgagggcaactggaggtcactttgctttccatctgctggtttcagctggtttttttctttatttatttaagcctgcttttttttttttttttttttttttttttttttgagatagggtctcgctccattgcccaggctggatcgcagtggtacaatcatggcctactgcagccttgacctcctgggctcaagcaatcctcctgccttagtctcccaagtacctgggcccacaagcacatgccaccatgcttggctaattttttaattttttgtagagatgggggtctcactatgttgcccagggtggtctcaaactcctgggttcaagtgatcctccttttgcagcctcccaaaattctggggttataggcatgagccactgcacccagtttgcatcctgctttgaccagcagggtcattaccggtgctcagaaaacaaatccggctgatttcccacctcattggtgccccaaaccatgctttttgtcaccccctgtagtaataaccattttctgtaagcaactgccatcagccacctctaaaactgtatctcttgcctagccattacgcaaaccacggtcaagttttctcacaatacagggtcatttttggtatctccgaaaagccaaagaaatcgggtaatactgtgcaaaagagagcggagcgttagacctcaggagactctccatgtggtgcttgaaactccacaaggaaagcagaagacctccaaccaacggtgagtggcatcttttttttctgagttccttaaggggtttgggtcattagaaatctctagatctctttacatggtactgaatatggcagcggaagcaggagtggggcggagtaaaagtatatgggagaacaattttttttaaatgaagtgaacagaggtgtcagaggcgttcgaaccagagtgactccatcttgaacagggtctgggtaaaataaggctgaggcccactgggctgcattcccaggaggttaggcactcttagtcagaggatgagataggaggttggcacaaaatataggtcacaaagaccttgctgataaaacaggatgcgatgaagaagccagccggaacccaccaaaaccaggatggcgatggaagtgacctctgcctgtcctcgctgctcattatatgctaattataatgtgttagcatgcaaaaagacactcctaccagcgccatgatggtttacaaatgccatggcaatgtcaggaagttaccccgtgtggtctaaaaagagagggaatcggtcgggtgtggtggctcacgcctgtaatcccagcactttgggaggccgaggtgggcgaatcacttgaggccaggagttcgagaccagcctggccaacgtggtgaaaccctgtttctaccaaaaatacaaaacttagccaagcatggtggtgcatgcctttaatcccagctactcaggaggctgaggcatgagaatcgcttcaacccaggaggcggagctcgcagtgagctgagattgtgccactgtactccagcctggttgacagagtgagactctgtcccccctgccccccaaaaaatcctttcaaatctcttgttaccagattttagctgggccaaacagctgataattctttttgtataagacccagaaccatcccaaagacagctcaaagaaagtgaagtttcactagccacaagtggagtctaactcacatttctgttcagctgtattctctagggtctcagcttctcagctgaccacctgcacataagggtccaaaagccctgtgtcccaaagacagaaggcaggaaatcaaaagctgttcatggaagggataaggatcaataaatggaagccagtagggactgattccctgatcaggaggcaaacccaagccgcagtgagaattttaaataccagactccaaaatggagtagcttccattgttaatcccacatggaatccaaagtgtgcagtttggttgttttgtttgtttgtttttgtttttgttttaatttttttaagagatagggtctcactgagtagcccaggctggagtgaagtggtgcaatcatagctcactgcagcctcaacctcatgggctccagcgaaacgcctcatcttgtctttaacctccaaactgggcttgtgccaagttcactttgggagacatttagtttgtggtttaaatgataatagcccttctccaaaactaaactgtcatcataaggctaatgaaagtctaccaagttaggacgatgaaaggagcctgagttctgctgatgtgtacgcataaatctaagattggccttttgagatgtcttttcaggattttgcatttcttcttcttcttcttttttttttttttttttttttgagatggagttttgctcttgttgcccagggtggagtgcagtggcccgatcttggctcactgcaacctctgcctcccgggttcaaatgattcttctgcctcagcctccaaagtagctgggattacaggcgtgtgccaccacacccagctaattttttattttttatttttagtagagatggggtttcaccatgttggccaagatgtttttgatttcccgaccttgtgatctgtctgccttggcctcccaaagtgctgggattacaggcgtgagccactgcgcctggccagggttttgcatttctgatagctgatggctccacctggacctgccaatgtgtcctgtggcctcacccagaagaagactgtcacccctgtcattgcatctgcaaccaaccagcagcactcattcccagggcccccaaactatccttgaaaactcctagcctccgaattctggggaggctggtttgagtcataataaaactccagtctcctgttcagccagctctgcatgaattaaactctttctctatttcgattcccctgtcttgataaattggctctatctgggaagtgggataaatgaacccactgcacggttacaatagcagcattcacgagagcccgatggccatgaacagacaaatgaatcgacaacgcacggcgttcacacaatggaatatgatatggccacatccaggacgaggcactgacacaggctatgacatggaagagcctcaaaacatcatgcagaggggaagacaccaatgcaagaggccacatattacacaactccacgtatatgaaatgtgcagaacaggcaaatccagagatggaaagcagattggtggttgccttggaccaggagctgcttaacgggtgtgtggtttctttttgggtggtaaaaatgttccgaaactagatatagtggtcacacaatgttgtatatttactaaatgccactgaattgtgtttttttgtttgtttatttgacggagtctcactctgtgacccaggctggagtacagtggcgtggtcttggctcactgcaacctccacatcccaggttcaagcaattctcctgcctcagtctccccagtagctggcattacaggcatgcaccaccacccctggctaatttttttgtatttttattagagacggggttttgccatgttgcccaggctggtctcgagctcctgagctcaggcaatcctcccagcttggcctcccaaagttctagttctaagataacaggtgtgagccaccatgcctggcttgaattgttcattttattttattttattttattttattttattttatttatctttttaagacagagtttcactcttgtcaccctggctggagtgcgatggtgagatcttggctcactacaacctccacctctggggttcatgcgattctcctgtctcagcgtcctgagtagctgggattacaagcacctgccaccaagcccagctaattttcatgtttttttctttttttttctttttttttttttttgagacagagtctagctctctcgcccaggctggagtgcagtggcgcgatcttggctcactgcaagctccgcctcccgggttcacgccattctcctgcctcagcctcccgagtagctgggactataggtgcccgcaaccatgcccggctattttttgtatttttagtagagacggggtttcaccgtgttagccaggatggtctcaatctcctgacctcgtgatccacccacctcagcctcccaaagtgctgggattacaggcgtgagcctccgcacccagctaatttttgtgtttttagtagagatggtttcaccatgttggccaggctggtctcgaacttctgacctcaggtatctgcccaccttggcctcctagagtgctgggattataggtgtgaaccaccgcacctggcctgaattgttcattttaaaaatggtaattttggctggccattgtggctcacacctgtaatcccaggccaaggtgggtggatcacttgaggtcgggagttcaagaccaaccttggcaacatggcaagacccccatctttagaaaaaataaaataaaataattagccaggcatggtggcatgcacctgtaattccagtactttgaaagactgagacaggaggatcgcttgaggccaggtatttgagaccagcctgggcaatatggcaagaccccatctctacaaaaaaaaattttttttaattagctgaatgtggtggcacatgcctgtaatcccaactacttgggaggctgaggcaggaggattacttgagcctaggagtttgaggctgaagtgagctatgatcacactactgcagtccagcctgggcaacagagcaaaaccctgtatttaaaaaaaatttttttgtggccgggcatggtggctcacgcctgtaatcccagcactttgggaggccgaggtgggcggatcatgaggtcaggagatcgagaccatcctggctaacacggcgaaaccccatctctactaaaaatacaaaaaattagccgggcgtggtggcgggcgcctgtagtcccagctactcgggaggctgaggcaggagaatggcgtgaacccgggaggtggggcttgcagtgagctgagatcgcgtcactgcactccagcctgggcgacagagcgagactccgtataaaaaaaaaaaaaaaatttgtaaatggttaattctatgttgtgtgaatttcgcctcaatatttaaaatgaaaaagaaaaaagtcaatagatgtgacttagctgggttatatttgaggtgtctagacatccaagtggagctgtcaggtaggcagttgtaaaacacaacaggagtgaccagttttaccagctcttatggaaatagctgcttcctgccattccccacccagcccactgcacgcactgttgcggcccagaggtgggcgtgaggtctctgctgccactcatcctcatccacagccagccacgctgcagagccacccagccagagacacctactctggtctccagctaggatgttgaggacctgtttcgaatgtcttggaagaagtcctggaatcctcccagcccccaggtacaagagtgaagacgcatacgctccctgtttatacaccctgaccctttatttacatccacccatggcaggggagtcaggtagaggcccccttcctcgatcaacctaaactcctgatcttggggttttcttgtgagggtctgatttttattcttctagggcctcacgcctccatcttcttctggtgccaacatcatgatttcaaggcaaagcttttccccaactccctaccttctatggatgaataaagtgcccagaggaggccagacatggtggctcatgcctgtaatcccagcactttgggagtccaaggtgggcagatcacttgggatcaggagtttgagaccagcctggccaccatggtgaaaccccgtctctactaaaaatacaaaaattagctgggcatggtggcacatagctgtaatcccagctacacgggaggctgaggcaggagagtcgcttgaacctgggaggtggaggctgcagtgagctgaggtcaagccactgcactccagcctgggtgacagagtgagacttgtctcaaaaaaaaaaaaaaagtgcccagaggagctcttcagctggcccaagtctggcacatgtccgtttcttcactgatcactgccacggggcacagagcccctgggtggtgctgtcctggtgcctgctggcccctgtcccccaggtcccccttctgagtttttccagggataccctaacctaacctggccagattactagaggtgctgctttattggctctggatatgtgtatgcagctgcaattctgtgtgatatagatgacctgccagtggggccctcctgaagatgccatagtgattaagatacgttttgttttgttttgtttgagacagggtctccttctgttgcccaggctggagtgcagtggtgcaaccacggctcactgcagcgtctacctcctgggctgaagcgatcctcccacctcagcctccggagtagctgggaccacaggcatgttgcaccatacccggcttttttttaaaattattttttgtagagacagggtcttcctgtgttgcccaggctggtctcgaactcttggcctcaagcaatcctccctcctcagcctctcaatgcactggggttacaggcatgagccactgcacctagcctaagatatggtttttgacctcagaaaacacagggtccttcagggttgtggcttccttgactgtttctttttattttattttattttaggttccgggatacatgtgcagaatgtgcaggtttgttacataagtagacatgtgccatggtggtttgctacacctgtcaacccatcacctaggttttaagccccacgtgcattagctatttgtcctgatgctctccctccactccccctaccataggccccagtgtgtgttgttcccctccctgtgtccatgtgttctcattgttcagctcccacttatgagtgagaacatgcagtgtttgggtttctgttcccatgttagtttgctgagaatgatggcttccagcttcatccatgtctctgcaaaggcccttcattcctttctatggctgcaccttgactatttctatggctatttctgttcttagggaggctcctcccatctccagtgcattcttctgcccccctcttttactgggaatggcggcatttctttgcgttttctgtaactagaattctctgtgtggctggcacagtgtgatgagctggcaagcttccccactgtgggggagggcttatcatgaggtctgctggaggaaactaagagagctgagccttaggggcttaaatgaactgcctgaggggaagctgacacccagtggggctgtaaccctggttggagagttcatgtctgcacctggcctcggcctgcgttctcacttgctctgcccaactggctgtgccttcagccggctcatcaccaggagatttgggttggagctactgctcagccaccatgagctacatgaccttgaaggccgatctttgattgtccgcaggataatcctgaaggttctcaggccatggacctgtgaatttcccttctttcagtgtctgcatcattgggaaccaagcccctaaccaatgtttattcattcgctcaaccaatatttgtggaatatcacagccctaggggtggggacacagcagggaacaagaaagacaagaattattgtcctcagtaggttactgtggagtggggaggctggcaggaagccacgtaactagaatacacgttaggtcaaggcagtattcccacagagaagatggaacagggaaggggagtgaaggccaggatgggaggtctacggacttaagtaggatgatctgggaagtagcatttgagtagagtctggaaggagggatgggaaagagtgttccaggcagtgggaacagcaggtgcaaaggccctggggcagaagtgtgcctggactgtcaagactgttgggctgtgtgtctggagcaggtaaaagagagataaggtcagcaaggacctgataagcagagcctcatggtcacgctgaggactccaggacctgtacaccgaagggaatgacaggagctgactcatgccctagcaggacttctctgtctgctgtgttgagcgctggtgatgggggcgtgggaagaagttaggagccattacagaggtcccggtgggccatgatcaggacaccacaatgcaggtggtgagaatggatcggattctagacatatctcaaggtggaggaccaagactttcatctaaatctaaacaatagttatgaaatgttaacttgagatggatctattggaattattcagatacttccaataatggatcatgagaaccaagaaaggccctagaatttatcctgatcttcgtaggattttcccaagggtagaaatgatgatgaactgggtgaccgttcacaaaggagagaggattcccagcccccaagcctgaagccttcccctcaatcaccctcaatcaccatcttctgtgggtcgaccagatgcacggactgttctcagccatccctgtggttcttacggcaatgtctagctgtgggactgcactggtgcttcgatggctcatagaagccccatataaggcactgctcctgtgggatgtgcctgtcaaacctgcttgtccactgccgttcagttcagccagagattgggccacattcagtcctcgcttccctgggagggggaaggtaagtgcgcgcagtccatccggcgaagagcaggtcagcctacggagggctcagcctacggaggggctcagccgacacaggtctgatggggcccgagagtggtcccaggggagtgggaggggccggcatcttcctcatcaggagtggaggagctgccttgtatgtggactagagaacagaaaacggcttgtctgtgttgctgggtcaatcactggaacattctctgaatgctgagttctgccttaaaacagcatgggtcatgctagatgaaagggatctctgttttatactctcatctcttcgctattgccgtgggatgaaagacagcagaaggaaggtgtctaagttcagaacaaagtgagcaagaccagctggctgctgttggtagcagaggcacagccagcctgtcatggcactggggggccgaggtgagctgtgccccctcctcctgggcttgtgaccctctgccccccatggggtatgtacatgtgtgtgtgtgcgtgtgcgtgtgtgtatgtgtacatgccttcttccctacttcactggcaagggaagagactgacacttgggttaggagaaggatgttgacctgggaggggtcaaataaggagaacccacatcttagatgctcaggattttatgatcttaggctcttctagaattgctgtacagttagattcagagtttggaattagagatctctgggccctcccctcccctcccgtcccctcccctcccgtcccctcccctcctctcccctcccctcctctcccctctcctcccctcccctcttctctcctttttcagaagtctccctctgtcgcccaggctagagttgcagtggcacaatctcggctcactgcaatttctgcctcctgggttcaggtgattctcctgcctcagtctcccaagtagctgggactataggtgcacgccaccacacctggttaatttttttatttttagtagagacagggttttgtcacgttggctaggctggtctcaaactcctgacttcaggtaatccgcccatcttggtctcccaaagtgctgggattacgggcgtgagccacggctcctggcgccttcccattcaccttccccttcccctccccttcctccctccctccctccctccctccctccctcccttccttccttccttccttccttccttccttccttccttctctctctccttcccttccttcctctctctttcttttcttcttttctttctttctttctctctctctctctttctttcttttcctttttttgagccagggtcttgctctgtcacccaggctggagggcagtggcacaatcatagctcactgcagccttgaactcttgagctcaagcaatcctcctgccttggcctccaaagtgctgggattacaggcctgagccactgtgcccagccctaaggttttttgttttgttttgttttgttttactgttaggactaacccttatttacactgggacaagttacaaagaaactcctgcaattgttaactgccattggagactactgtaagttgcttcatggcaactgcagaagggactagtgacttctatttagctccacccactgatgcttgaagttcagtgtggctctgggggctccagaagcctgaggggcagctggctggggcagttggctggggtctggagagttctgcagagcccctgtcttcagctgctggtgaggcagctttggcttgagctgccctggctttctgagttcagtctgatgggagggcacagtcagcaccctcagaccctcctcaggagtcttgtgaggctcgggcaagtcaggggcagagggacaatccaactagaggaccctcccagacccggtcgttgccacctggacccagccccaggaaggcacccgagaaacctgtagtcctcggctgaccaccagtcctggtcctcaggatatccgcagagacctggctgtccagaactcccagggtttcagctgcaagctggagatgtggccccttggcaactcgatatagtaagatactggagagcgtgccagagtgtcatttgctagaaacaaacattatactgcggtaagccctagtttttcagtcattggctctttggcaccaacttaatcacaaggccattggccccaaagaaaggccttgtaggcgactgtttagggacacctgtattttccatctgccttggaacctctaggctcaggccgaatgcctattgaagtagatgtttcgtaagagatttgggggcaaatactgggattttataaagatgctgcactctccttcactaagtagaaagctgagaaatcctgccctgaggggaagaaacagttgtcttcctgactgatgcatcctagaccagccaagacttcctcccgctttccttcttctagaactttccccacttcagccagtatctgtcatcccctgggctcccaccctctccatgtgccgctttcatcggggctgaggggagcaggagaggagacgtttctgctggtgtccccgctgtagctggaggagctcggcgtcggcgtgccttcgcctccccttgccatgatgccccctaaaccgagtctgtattgagagagaaaggtggcaccgttgatcattactccaggacaagagtcataaaaggactgtcccagacaacctaggaccccagtgttctgtggcgaacacttctaggatgaggcccatctccttctctgtttcatcaattggattaattttattgttttctaaaataatgactatggtttttattgaacccatacttgcttattctaaacattcttttttttttttttttttttttttttgaggtagagtttcactctggctcctaggctggaatgcagtggcaccatctcagctctctgcaacctccacttcccaggttcaagcgattctcctgcctcaccctcctgagtagctgggactacaggcgagcaccaccacagccggctaatttttctatttctagtagaaatggggtttcaccatgttggcaggctggtctcgaactctgacctcaagtgatctgcctgcctcagcctctgaaagtgctggattgcaggcgtgagccaccgcaccaggcctaaacagatttctttacaatctaccaccatgaacagcaagcattagcattggtgaggagtgttccagaatccctctgctctctgcctctccatttctctccccctctctttctctctcatgcacacacacacacacacacacacacacgcgcgcgcgcgcgcgcggaatgacaggacagactgatcggcagattggatgaatggatggatgggcacatagattgagggactcccagagataaactaacaccattttataaaaatggtatcatattctacatgattgaaatgtaaacttttaattttacttaaattttagttcagctcagatgttgctggcaaaagtttttttttattatttttattttttatgtactgctccttgaggagctgggctaactcataggcagtgcatccagattcggcatttttttttttttagatggagtctcgcactgtcaccctggctggagtgcaatggcacaatctcggctcactgcaacctctgcctcccaggttcaagtgattctcctgcctcagcttcccaagtagctgggattacaggcacacaccaccacacctgcctaattttttgtattttagtacagatggggtttcactatgttggccagactggtctcgaactcctgaccttatgatctgcccacctcggcctcccaaagtgctgggattacaggcgtgaaccatcgcgcccagccaaaaaatattttttaattgttaaaaataataatggaatgccaaatgtagtagaacagtttcacaatgacaagaactattagttcctaaaaaatccccaagattcagataagagattacaaaaaccttgataaattagtgacattatgtaaaatcaacagtgctgggtttggtggctcagacctgtaatcattgcacttagggaggcagaggcgggaggagtgcttgagcccaggagtttgagagcctggccaacatagcaagaccccattctccacaaaacggaaaatacaataaaataaaatcagcgttttgttttattttattaatttatttgagatggagtctcggtctgtctccctggctggagtgcagtggcgtaatctcagctcactgcagcctctgcctcccgggtttaagcgattctcctgcctcagcctcccaagtagttgggattacaggcatgtaccaccacacccagctaatatttgtatttttagtagagacagggttttgccatgttggccagactggtctggaactcctgacctcaggcgacctgcccgtctctgcctcccaaagtgctgggattacaggcgtgagccacgtcgcctggacttcctttattttagatagcacagggtcatggaagataaagtgatgccttccttcccctaccccctaccccgatttctactgcttgcattatttcttagggtaaagaatcttcttatttggctggaagactctattcccaccgtagtttagtcctggatgtgtgattaaagaaatccagtggttgccctgcgctgagaaggacagccgggcctgggttctctcctggctcagtacagccccctccccactcctgctgaggactcccagggaagctggaggcagctctggggcgttttctctgacttccctagacttctcttcagctgcccaaacagtagagggatgctgaagccctctcttcccgcagtctgtccctaagggttgcgctggcacctgtgcccccagtgccccttggcagcactcctttggtttcagggcttgtctgccatttttcttttttctttctttcttttttttttttaagacagggtctcagtctgtcatccaggctggagtgcagtgatgcaatctcatttcactgcaacctctgcctcccgggctcaagtgatccttccacctcagcctcccaagtagcttggggaccacaggctcacgctaccatgcccggctaatttttgtattttttgtagagacagggtttcgccatgtcacccaggctggtcttgaactcctgggctcaagcgatctgcctgcctcagcctcccaaagttctgggattgcaggtgtgagccaccatgcccggcctgctatttttcagtttgtggcagaaaagttgttttcctttcctcattttgtggttgctgctttattcacttatttatttttttaactttttaaaacgcaacatttggttcatttcaccaggagctggggagggaggtacaggaggctgccctgatcctttgttgggtttgatctggagactttgacgtgacagagcgactgcgcccactggttgtcctctaagaaggcgtgaggggaagcccagacgcctctgcaggagccagagacattcctagggggtcacagggtcagctgaggtgaacagggattctggaatgaggaagccaaggggatggaagggaggaggctggcagggaaacgcccagagcacgtgctcctgcccgacacctccaggcagagaacaggagctggcaagagaggaaccccgcttgtggtggggacgctgaacaggcagggcctggctgggatgggggcccagcctaggctgaaaacgaagagaaaggaaagtgggtgccggtgtcccacgcactgtggacccccagccctggccctggggtggcaggggcagaaccgggcactgcagggacctcctcagcccaccctcctcctgcttcctggcagggatgagagagggaagcaggaggcagggtgggattgccagctgctctcggatcgttttttttttttttttttttttttttttttttttttttttaaaaacgggatcgtgctatgttgctaggctagtcttgaactcctgggctcaagcgatcctcctgcctctgccttccaaattacaggcatgagccactgcaccaagcctggatctttttttttttttttaaacaactttgttgaaatataactcacggccaaacacagtggctcacacctataatcctagcactttcggaggctgaggggggaggatcacttgagcctaggagtttgagaccagcccaggcaacatagtgagacccccttctttacaaaaaacaacaacaacaaaaaaaatgagcctggcatgggggcacatatctgtattcccagatactccggaggctaaggtagaggatcacttaagcccagaagacggatgttgccgtgagctgagattgcaccattgcactccagcctgagcaacagagcaagaccttgtctcaaaaaaaaaaaaaaaaaaaaaggaagagctataacccatacggcacacaattcacccgtttaagatgcttctagtgtattcacagatgtgtgcaatcgccgccacagttaactttaggacattccatcatctgtaaaggaaacatcccctacctttagctaccatcctgacatcctgatagacagggggcctgaagacccctcggtgatgcagggcagggctggagtgggggccctgggctgactttattgctcgctattgctgccttgaaattctgaatacgtttttaaaacaaacgcaccatcctttcattttgccctgagctccacagacgatatagctggtcctgaagtggggcagaggatcattctgacttggagtcagactctagcgacgcaggcttctactgggtggaggcccaggagctcaggagccttctgtgggagtgtgcccattggcagcgcatccctggagatggacggacaatttccacatcgcctttgcccctgtgcacgctccctctggctgccgtcataaattaccacaaactgggtggcttaaaacaacagaaatgtatttgctcatggttctggaggccagaagtccacactccaggggtgagcagggccgcacccccatgaaggctccagggagggtctgcttcatgccttctcttgagtttctagtgttgccaccgacccttggcgtgtcactccagtctcggcctctgccaacatggggtgatcatggggtgtctaggcctagggcccttctcctcctcttcttcttcttctttcttttttttttaagacagggtcttgctctgtcgtccaggctggagtggagtggcactacctcagctctgcaacctacacctcccaggctcaagcgatcctcccacctcagcctcctaagtagctgcgactacaggtgtgcaccacaacacctggctaattaaaaaaaaaatttttttaggccaggtgcagtggttcatgcctgtaatcccagcactttgggaggccgaggcaggcggatcacttgaggtcaggagatcgagaccagcctggccaacatggtgaaaccttgtctctactaaaaataaagaattagctgggcatggtggcatgcacctgtgatcccagatactcagaaggctgaggcaggagaattgcttgaacccgggagacaaaggttgcagtgagccaagattgtgccattgcactgcagcctgggagacgagcaagactctgtctcaaaaaaaaaaaatttttttttagcagattttagcagagacaaggtctcactgtgttgcccaggctggtctcaaactcctgagctcaagcaatctgcccgccttggcctttcaaagtgtgggattacaggcatgagccaccacacccagcccttctcctcttgttataagggcacccatccctggactagggcccaccctaatgacctcaacttgattacgttggcagagacttattcccaaatgaggtcctacttacaggtactgggggtcaagacttcagcattcttttgcggggggccacaatcagtgacaccctgactcgcaagcctcaatcacctgttccagtgagaaacaggactgagatcagaaggaatgaggcagagctgccctcgattggttctcctctcctcctcacctgcccaccccggcctctgcgcccgtcactgtcctctccagctgttcttccttccgggcaaggagactcagcagaagggtatgagtggcctggccctgtggggagccgcagacaggcctgtgggtgctttggataactactgcgcctgtcaactctccttggtagtctagggttcaaagcccaggtccattctagaagtctgcttccaagtgctaaggaagcttcaatagttactgggaaaaccacaggggtcaaaggtccgtcgagttatttcccggatccgagtctgacgtcttttccccgccgcttgcggtggttgtgaccgaaccttgagttttggaacaggtcacatggctttgaaatcacggtcaattcacctggtgctgctttgacttcaggctcttccttctgcccagctccgtcccacccagcagcccgcagagaaaggaggcagctggcaccacactgggctttggagacactgcggggactgtggaccccaccctgctgcacggagctcctgcaaaagcaaacctgagaaccttggtgagtacttccggagacccggctcctgggacggcttctggcgctgctcctgcacacacgactctccaacgatcattttccatgttttatttttatcttttaatttttgagatggagtctcactctgtcacccaggctggagtgcaatgatgcaatctcagcttactgcaacctctgcctcccaggttcaagtgattgtcctgcctcagcttctcaagtagctgggactacaggcacccgtcaccatgactggctaatttttgtattttcaatagagacgggtttccaccatgttggtcaggctagtctcaaactcctgacctcaggtgatctgcccgccttggcctcccaaagtgctgggattacaggcatgagccactggccccggcccattttccatttttcagatgacaggtgttgatttgctctgattttcaagtatttttagcatacagatccctgcaagaggcatctgtctccagtggtccagcctctccttccaaatgaaaagaatcaagtcacaggaattcatgggtctgtaaggaatcgctcccatctgtgcccaggagattaacaaaggcggtggctgcagctctgtgagcagtggagaaaaattaggcacaacctgatatcctcccacaggagcgtaagtccactgtggttattcatatcattgaatccagtgcacagtttaaaggaccatgcatgtatcaagctgcatgtatcagtatgagaaacctcagaagccgtacagccttgcacagaacgatagtttctgtgaagttccagctaacactgaaggcactgttgatgtaaagctgctgtctgcacgaagtatcatgcaaagatgctatgtactgtttatacacacttccatttgtaggaaatgatttttaaaatatcatttttaggctggactgtaatcccagcactttcagaggctgaggtagacagatcacctgagcccagaagttcgagaccagcctgagcaacatacggagattccatctctacaaaaattaaaaaagaagccaggcatggtggcgcatgcctgcggtctcagctacttgagaggctgaggtgggaggattgcttgggtctgggagctcaaggctgcagtgagccacgatcacgctactgcgttccagcctgggcaacagagtgagaccctacctcaaaaaaaatcatttttaaatgattttagaatgtctggccagagagggagggaagagggactgaagagaacaaaaaggcgccatctgcctcgcatttccttaaaaagaaacctgaagtgcagaatgtcaagatggttgaatccgcatggtagatatgtggatatttgttatttgcaggattttttaatatgctgaaaacagtgcacagttttaaaacattttaaaattatttagatggattaatgggctaatggcctcatgttgatgccagagaggggctcaggcaggggcacagtggggtacacagctcatctctcgctgggatgggaggctgggcaggtgacggctgaggacctccaacagctcttagagtctgcactagccagcatgtcccctgaagagcaggtgttccgggctgtaacggcgacctgcttcgtgtattctgtccagacagacctgggcttgggacatcagccctggtggtggccccagatcagctgcagctcagccctttcggggacctgtccaccctctgtctgcctcgccatctttgtaagcccacaccccccgcagccgagccgtgctggccgttactaccctgaagtgtcttctgcgaggcacttgtgcccagtgtcactccccagcacatttccctcatgtggagtcctctgcgcagtcctctgtgtcactgtcctgggccgctgcaaacaagggaccacctgctgcgtagttgaaaacaatgggaacttttttttttgtttttttagacagagtcttgctctgttgcccaggctggagtgcagtggcacgatctcggctctagagaagccgacagtcttgcttctaatgaaaattacctttcataaagaacttataaagcagcatttccaaagtgcagcacccctactgttatttgtttgtttgtttgtttgtttgtgtgtttgtttaccgggacagggtctccctctgtcacccaggctggagtgcagtggcacaatctcagctcaccacaacctctgtatcccaggctcaagtgatcctcctgcctcagcctcctaagtagctgggattgcaggtgcataccaccatgcctgactaatttttgtatttttagtagagacagggtttcaccatatttgccaggctggtctcgaactcttaggcttgagcaatccttcccccttcgcctctcaaagtgctgggattataggcgtgagccaatacgcctagcctactaccattattttagatgaatttctaaaaaaaaaaaaaagtatttatttactttaattttttagaaaaagctgtaactgacacaacaaagtgtgatttagtgactttattgcttaggattggggtagagcaggtggggccgtggcactcaaccttacacagagggagaaaccagaatggcaaatggccactggaatgcttcctctgccgtaaacatctcaagactgtgggttctgactggcaaagagtgcgccttgctaattttacgatggagttgattttaaaacggtgtcaccctggctatcctggggtcctgcttacctgacaactccacccccatggccacccctcctagggtcctcccagcgcccagccatgggggaactgtgccgcagggactccgcactcacggcactggacgaggagacactgtgggagatgatggagagccaccgccacaggatcgtacgctgcatctgccccagccgcctcaccccctacctgcgccaggccaaggtgctgtgccagctggacgaggaggaggtgctgcacagcccccggctcaccaacagcgccatgcgggccggtgagcgcagctccctcttccccacctcttccagcttcccgtggcccacatggctccactgtctgcctctgtcttcagggggtctcttctcgtcctgtctcttataaaaacacttgctgttgcctttagggcccacctggataaccaggatgatctgatcttgaaatcattaacttatatctgcaaaggcccttttcccaaaaaaggtcatctggacaggttccaggtggatgtgtctttgaaggggaaccaccattcacaccactacagctgtctttggagtccattctgatggtctgactagtgtttattcattaaaaaatggggatggtaatggctttactgtatacggttgttaggagaagcaaatgagttactgtttataaaacactcactgcaaagctggggccatagaaaacaggcagtaggtggtagctgtcaacatgataatgttcatgcatgttggcgtacgaaccccaaacacaggagagattgatgcacgctggtcattctggctgagagagatgggctctgggccctgggcgtggaaggccccgaggctctctgggacctgtcacccgcagccccggggtgccactctgctttctgtgcgcagctccaaagctgacagcaccgtggtgggaccctgcgtctgcatcacccaccagcttgccagggaggtgcttgcaagcagggacccacctcctcaccccgtcccggtccccccgcactcgccagagcactggggttgcagtagttgctcgatacatgccagctttgcccttctcgagtctgactgaggtcatgggggtaaagggagcctgtgagagcagtgagggcgcgtcccacccagcagaacccagaaaaccgctttcacctcccgattcttacatgtgcggggggtttcccagccccaggcctctcccccgtggggaagccagccagggagcccagcccccttggtagctgggttctgcccagacagacggttctgcctcccaagggcacttgctggatttgctgaagactcgagggaagaacggggccatcgccttcctggagagcctgaagttccacaaccctgacgtctacaccctggtcaccgggctgcagcctgatgttgacttcagtaactttagcggtgagagctccgactttgacggtttggcaggcacttctaggaacctcaggctcctggtaaccccaggtgccccgcttacttgccgatttgccctactcccccttccctccaggctgcagttcctgtcccagccccagcactctgagggtgaggaaccccctcactgtattggggttggataggataaggagcccctgggccttgactctgaagggtcggtccttagttacccagtgccaaaaggagacccctgagcggtagggtggggagaatctgcttggagagacacaagcaaagggcaagggagtgtctcctggagtccgcctttaaccttgcggctttgctggaggggccagaacggcccagcctcagctcttaggaggcgacagagcggccccggccagagggtacagggccttggcagggccgcggagccttctgtgcactgctcaccattttccttcagggagtaattctaggcttccctggaggagctgttgaaagatttaggtattgaaaggagcaggagcaggactcacacgacccaaaacagtggagaatagaccattttccctgtgttccagcacggtgtgtgtttatgttctttagagttctagtacgcggattcgtattctttttttatctttttctcaggataacgttaaaatgagttagcactgagtgcatttcagctaccgaggagggtcattaagtctgaacagtggggtctcacggggaaggtcagagtgggtaaccctcgtgccaaaatcgggagtcacgctgtttattcaaccaaaagaccaagtctgcttgaggtccaggagcttttaaggagaccagcaggttaaagctgggggcctgctggggagtctgggcaaggctgtgggggcatgggagtcatgcctcggcccaccggcccatctgtgcacctgcacacctgcccacatgcccacccgcccacatgctcagctgcccacatgctcacccgcccacatgctcacccgcccacatgctcacctgcccacatgctcacctgcccacctgctcacctgctcacctacccacctgcccacctattacctccctacctgctcacttgctcacctgcccatctgcccacaggtctcatggagacatccaagctgaccgagtgcctggctggggccatcggcagcctgcaggaggagctgaaccaggaaaaggggcagaaggaggtgctgctgcggcggtgccagcagctgcaggagcacctgggcctggccgagacccgtgccgagggcctgcaccagctggaggctgaccacagccgcatgaagcgtgaggttagcgcacacttccatgaggtgctgaggctgaaggacgagatgctcagcctctcgctgcactatagcaatgcgctgcaggagaaggagctggccgcctcacgctgccgcagcctgcaggaggaggtagggggacaccctgcaccccggcgcgaccctgctgtcgtctgcccccaggcctttgtactagctggtccatctccctggaactcctttcccctcttccttgtctaacacttccctgccccgagagccttggctgagacccctctgggaagctgatccttcccctccccaggaggccacccaggcccctctgtgtagcctgcatggcgacgaggtgtgccttgtccagtagctgcccgtggcctggctggcttgtctgtgaactgcccatcctgctgacgcctgggcaggtctggacacactctgggctgcatatttgtagggccgcctacgtcccactgcccagctgcggcagtgacatgggatagtcggcctctgtcatcctcctttgtccttctcagctggtcctggactcaggcgggatagttggtctctgtcgtcctcctttgtccttctcagctggtcctggactcaggcgggatagttggtctctgtcgtcctcctttgtccttctcagctggtcctggactcaggcgggatagttggtctctgtcgtcctcctttgtccttctcagctggtcctggactcaggcgggatagttggtctctgtcgtcctcctttgtccttctcagctggtcctggactcaggcggggagggcaggagggttctcaagtgaggcctctgaaactcagtgtgtttcactcacttttctttggggaggatgatctgactgattggtaaggcttctcaaaatactgaggatgtgcactccttgtcattttggcatttgctttttacctttattattattactattatttttaattttttagaggcactatctcgctctgtcaccaaggctggagtgcagtggtacaatcctagctcactacagccttaaactcctgagctcaagtgatccccagcctcccgagtagctgggactacagattgtaccaccatacccagctaattaaaaaaaaattttttttgaaatggggggttctcattatgttgcccaggctggtctcggactcttgggctcaagcgatcctcccacctcggcctccaaagtgctgggattacaggtgtgagcccctgcgctggccagcgctttgcctttaatcatgacatttgttgtttgtttttaattttttacttcttatttagaaataattccaaatatatatttttaaatcacacaaataaaaatagtacaaataatacccacctacccttgctttatcatttgtacttttactctctcgtggccctttatgtctacttcctgaaaatcagcacctgcccctatatagccacagtgcagttctcaacttcagtctttttggtatggacgccctgtttttatccaatccgcctgtgttctggttttctcatctgtcccagtgactccttcacagcctttcccccagcccagggtcgggccctgtgttctgctgttcctctctttagccaccttcatttgggaacagcccacagcctttctttgtctattatgaggtggccctctttaaagcccccaccccttccctttgatgatagacgacctctcatttggggtttgtcttgtgtttcccacatgtatacagaaattatgttctttggccgggaccctgcacagggggtgctggcctgactcagggcatctcctcgagggctctcgaggtcctgtcgcccctcacaggggacgtcacaccgtccaccatttgtcaaggtgcaggccaattgctctactgcagaatggctctttcttttcttccctgcaactgataaatatctcgggtgtggggcgctgagaccagcaagcaccctgctcctggtggacatttcccaggatgtagctgtggtgactctggcgggagctggcccctaccctgggagctgtgaatgacgaccgtgccagtgctccaccttgctgctgcccacggcctctgccttcccttctcccttggctgactttggaccaggccagcccactttgctgctgcccacggcctctgccttcccttctcccgtggctgactctgttcttggcgcagttcatgggttcctactctgcaggggtctgacctctcactgtccttaatgattttggtctcaaatggacccagatgtgaccaatggaacccttcaaccagctccgtgtcctaaaacgggtcccttgtttttggagaaccaactgcttttctggcctcacaagatattccagggtcatcttgtacccggcctaccccaaatccaggctcagcccattctctgagggccccacttcctttttttatttttattttttggtttgtttttttgagacagagtctcactcgcttcccaagctggagtgcagtggcgccatctcagcccactgcaatctccatctcccgggttcaagcaattctcctgcctcagcctcccgagcagctgggattataggcgcgcaccaccacacctggctaatttttcgtatttttagtagagacggggttttgccatgttggccaggctggtctcaaactcctgacctcaggtgatccgcccacctcggtctcccaaagtgctgggattacaggcatgagccaccacgcccggcctcctgcctccttttagagaacaagatgtgggcgtaggtgtgtccatcactactagggtgtctttgcttctcagccctttcaggggacagagctaggaaacacacacacatgtatggacatatacatacacatatgcacacacatacttgtctgtgtacacacacatactcatatgcatggaagtatacatatagttcacgtgcatacttcagaaatcatgggttctcacccatacctctaattccaacccatgccctgcggctttttcttgccttctcctgttccgtacgtgtgtgctccttccccagggggaacgctgctcccagcgtcaccagcaccttcagacccgtgctcagtcctgcagcacatctcaaatcgtttcagaatcactctgcccataccactgccattaacagccccgctaagacgggtgccggacttgtttgtaattcacctccccccgccagccaatcttgctcaaggctgagggtttgtaatcaaacactgtgtttgtgagtcactgtatcttcgttctctctgtccttgtctgtctgtctctctcttcgttgtggttatggcgtctgttggaaatagaattcggttcatttgttctggttcactttcagtctcatgttttccggttcccttccagctctgacttgattttactttttgaatctgtggacggtgacatgcccagcccagctggaccattgcaggagctgggaacttgcgaattgacaatgtgctaaccgggtgtcgggaggggagagtccaggtggaaaggtccttcttggccacagcccaggggtgagcaccggcacccaccccgacgtgcagacttcccgggcttgcctcacggggaaagtcctgcctccccagggctgccacacccaggacgggaagagggcgggcccgtggctcgagctccaagtttctcttgggctgctgtccagaggaaggaggccagcaggacctggtgggatagtccctggaaggccagggccctgcacacagactgcaagtcaacacaggagctttgctgtctgaacagccccggtcccgcgttcccaggcacgtctacccctccgacctgactttcctctctcttacttcttactgatttccatgactccaaattccctttcttgatgtatttagcagaacatggacaagcagggaagccagggagcatgctggccatcactgccggctgctcagctgtagagatccaggagttggttatcaaggcctcttggtctattcctgggaccctaaccctggatggagttcaaccgcggtgcctcatctataagacagagctgaaaggcctctgtcctcccagccccagttgaatatttgggactattcattaggtgaaccctttcgtgggtttttcagtctcgaggcaggaagccccctgagtgctaaaagcatcattaggaggaagggtgagaaatgcccccagctcctgatcaggggagaagctgtttccatcgcccttcctgtcgcctccccaccgcacagctgtatctactgaagcaggagctgcagcgagccaacatggtttcctcctgtgagctggaattgcaagagcagtccctgaggacagccagcgaccaggagtccggggatgaggagctgaaccgcctgaaggaggagaatgagaaactgcgctcgctgactttcagcctggtaggttccggtccccgcagcagagagcggcctcctgccttgggggcttggccctcaggctgtggggtttctgacaggtggtttagttaaggtgaggctaagaacaagagatgaaatttagtgactcatctcacccactttctctttacctccttccttcctgctgttccccagaccccaaaattggcagaattaaaagctgctggaacagaattaaaagctggaactgggcacagtggctcattcctgtaatcccagcacttgggaggccaagatgggcaagatagcttgagctcaggagttcaagaccagcctgggcaacatggcgagaccccatctctacaaaaaatacaaaaagtagccgggcatggtggtgcacacctgtggtcccagctattcgggaggctgaggtgggaggatcgcttgaccctgggagtttcaggctgcagggagctgagatcacgccactgcactccagcctggcgacagagggagaccctgtctcaaacaaacaaaaataaaagccgctggaggtgcatcacaatgcccgacttggtgggtttactgcagcgactgtgttctggagtggacttggccaattgtaaagcatgggattcgcgttaaggatgggggaaagaaacctttctgcctggaaagactccgccctctgggcctcaggtgcactggagagaggggggctctgaagtggagcagtgagtgagcaacgacccttggcgtctcctcctcggcccctctcagtagattggtatttattgagatattccttccataagcattcactgggcccagggcactggccatcttgcagcccggattgtgtctctgtttataagctccttcctgggaagtgagtgtcagaggggaatgacctgtctgctggtttctccctcgctgtgaaactgccggtagatctgttgaaggagaaggctgacctggtaaagggaggaactggtgtcctcagaggttgccagcttcctgtgttccttctccttggccatgaatctgcacttttcccaggcatgatgggtggcttttccgtggcttctctcctgcccggtgtagagtggcaagactgcatccgtccacacacctgaccgtgcagttgccgccatcttctcgggattctgcttgcctagggcaggcctctggggaagccagcaccccaggctgacctctctctgccccaggcggagaaggacattctggagcagagcctggacgaggcgcgggggagccgacaggagctggtggagcgcatccactcgctgcgggagcgggccgtggctgccgagaggcagcgagagcaggtgccgtgtgagcccttcctcccttgtgactctcctggggcttgtctcaggggtgcggacaggtctgtggggaagccagattccttcatccacgccgagctcacataattttgctgaacgaatctgtcggcctgttcatctgtccctttgtcagcgccaccctaagcaccgactcgcaccccacagctaagaccatggtcaggcagatgcgtgattcaaacgcaggggatttcagggcccaggccccggggagagccagggacttaggtgaggagggaacggggaggaaaggagacggtagaagagaagaggacagggagggaaaattgtttttctgggacattaaaaacgcaaaacacaactatgcatgcaacatcccctcattgttttaattcagacgtaatcagcctaagcaactttctagatgcacctcgaaatctagcacttaagagacgagcgaggccgggcgcggtggcccacgcatgtagtcagcactttggaaggccgaggcaggcggatcacttgaggtcaggagttccagaccagcctggccaatatagtgaaaccctgtctctactaaaaatacaaaaattagctgggcctggtggtgtgtgcctgtaatcccagctactagggagactgaggcacgagaatcgcttgaacccgggaagcagaggttgcagcgagccgagattgcgccattgcactccagccttggcatcgcagcgagtctctgtctcaaaaaaaaaaaaaaaaagagagagagagacgagtgagaattgaccttatttcatccctagaactgtctccctccctccacccctgggttccccgacccccttctaaggccagaccctcagagctgctgagcttcacggtccatgtgtcccactctgtccagtactgggaagagaaggaacagaccctgctgcagttccagaagagtaagatggcctgccaactctacagggagaaggtgaatgcgctgcaggcccaggtgtgcgagctgcagaaggagcgagaccaggtacctgagaggccgggcccaccccgccaccccatgcttgcttccccaggtgagggctggttccggggacagtctcgtggctccctgcccttgatggcagctggtcccagatttcagggtctctttcctcggtccacacgaagtttcttcactcctccaggcctgttgtccacatgctgtctctatcatccttcttgctcttattcctggtacatgacactgagaaagtacaccccaaatactgggttttatcaacactgcacatgtgaacacgaattgaaatgaatcttaagtttgcacagctcagcgtgggccatttagtggatgtcagatgagcgcaggctagaaacagggctctccttctctagctgaggctccccggtggtgatggcgcggcctccttactcccgtcgtggcccacaggcgtactccgcgagggacagtgctcagagggagatttcccagagcctggtggagaaggactccctccgcaggcaggtgttcgagctgacggaccaggtctgcgagctgcgcacacagcttcgccagctgcaggcagagcctccgggtgtggtgagtgttcccggctgacccgagctggaggccaggcaggggctgcggtgacagtgggacagagctgggctccagggtggcccatggaggcactgggaggacaggcagggtcccaggctgggccacacgcggcacctgcagagacggcccagtgtcactgtgatgagcgacacactggctcccacgcgtggatggtgccgtgaaacctcgaaggtgcccagtagacaagtagagtctgcctccatatcatcgaatggggagcttagcggaaggttctggaacctgtggagtgtggtgatggatgtggcaggtggcgtttgaagctgtccacaggcagccatttgcagtgtagatgctgtgttcctgaaatgcttaaaagcccagcgtccaagagtggaaagacagacctacatgtaacggagggagcgtgttcccagaaagccagaattcttagaaagcctctcattctgggctggcaggcagctccagctccaggcccccggggaggcaaaggagctcctccctccgcatgcggaacccacccggcccttccttccttaccccctgcatggcaagcatcccacaccgacggtggaaacacacgtgtgcacgcagagaaaaaccctcccggggcaggcaccaacacgcaggctgtgctcattctgggtgtgagatgacgggtggattttattttcttctctaactggttctacttgccttcctccaattttctgtgtgtgtatgtatgtgtgtgtattatacattattcgtaaaactagtaaatcacacatattctaaaagaaatgaaatgctgtgtgtccagctggtttctttcagtctctttgattggcagcgcctgtgatcctgtgatgggctcggaggacagggacacaattgttttccctggaagctgacgagaggaaactgctggggagggtgaaatgggtggtgctgacctggtagaaactccacgggcctcaaagcggaacctttcccgaattaaccagcctgtctggcctgtctttggcagctcaagcaggaagccaggaccagggagccctgtccacgggagaagcagcggctggtgcggatgcatgccatctgccccagagacgacagcgactgcagcctcgtcagctccacagaggtacggccgctcctcccgcctccctcactgccttgaccctctgggccagcccaggggcctctctgtcaggacgaaagtgagcctccttccaccctgtccccacagggaagaggttggtacgattgtgagagttttattttattttattttttgagacagagtctcctctgtcacccaggctggagtgcagtgatgtgatttcggctcactgcaacctccacctcccaggttcaagcgattctcttgcctcagccacccaagtagctgcattacagacacctgccaccatgcccagctaatttttgtgtttttagtagagagggtttcaacatgttggccaggctggtcttgaactcctgacctcaaatgatctgccagcctcagcctcccaaagtgctgggattacaggcatgagccaccgcacctggccctattgcgagagttttaaacatcagaggttgattctgtcacagtcctggagcccagacatccaaagtcaaagtgctgacagggtacccgtctggaaatcctattcccaaagaaggtcacattcacagcttgcagggtggacatgagtttccaggggaaccgattcaacctggcacagacagtccccagacatgagtttccaggggattcaacctggcacagacagtccccagacatgagtttccaggggacccaattcgacctggcacagacagtccccagacatgagtttccaggggacccgattcgacctggcacagacagtccccagacatgagtttccaggggacccgattcaacctggcacacatggtccctgggatgccggcctcactgtggtttctggagcctcaggaccctggcatctgtcctcaccctttggcaaagtaaagaggtggtcccaccatagtgggcatgtggcatgaggatgctgggggtcaaagccccagtgccacaggatgccgggagccgggagggagggagggtgagaggcgggcgaggctgacatccctttgccatgccttggggtggacctggtgtttccttcctggaccatcccatcagtggcccaagagcagcaggcccaggctcacctgccccctggccactcagagagctgggggaggccgggatcttccccagaacactgagtgcacacacggggaagatttcacagtcggtgctgggcctccctgggccaggacagtccaaaccttcaactgaatcgactctcgcatctgccttaacgccctctgtgcccccattccccacaggacagaggccagccgtgtttcccttccccaggggtggattgggtcagggagggaagggacctcaggtgctcagaactggctcgccagaacacaccatcctcattcaccagcctcgtgggcaactgaccgatcagctgccctccagccactctcctcctgccccggctttctaatctggctgctctagggggactgcctcctacttcatgggctctctgcgtgccactgctctgttgctctctctgtctggaatgtgccccctgcccccaacacacacacactccacctcactcctctgtccatgccacttcctccagagagtccgccctggcctccctgccctgcccatgtcgcccacagccctggaatgcctcactccacctcactggtccacgggtgcccgttggttcccccaccccaaggacagtccctgtcctcagatgtacatctgacactgtcaaaggacctggcacatagtagctactccaggaatacttattagtgaaagaaggggcgggattcagacctaccccacacatctggtggcctcagcgcctcgcacgtcacatttgtcagtgtgcactctgagtgcggcctcccctccctagtcactaactcaacctctctgggcctcagttgctttgtgcattagttcgttctcatgctggtgatacccacatacctgagactgggtaatttacaaagaaagaagtttaattgactcacagttcacagttcagcatggctggggaggcctcaggaaacttacaatcatggcagaaggcacctcttcgcagagcggcaggagagagaatgagtgctcagcaaagggggaagccctttataaaaccatcagatcttgtgagaactcagtcactctcacgagaacagcatgggggaaacggaccccatgattcagttatctccacctggtcccacctttgacatgtggggattattacaattcaaggcgagatttgagtgggaacacacggccaaactatatcactttacatgtaaaatgggacagcagtgccaccttacagatttatcgtgagaactaagccaagcagctaatagagcctgacatacagcatgtgtcagtgctgtgtgctaattgcatgtgaccccagtgtctggcatacagcaggtgctcagcgcatgtgaccccatgtgtgtccttctttcccctcctgcctcctctccagtcagttctcactgtggctctctctacaccgtgggggagcaagggaggagtctcagggtgtcctcgtgcgtgccccactgacttctgccctccctcctccagtctcagctcttgtcggacctgagtgccacgtccagccgcgagctggtggacagcttccgctccagcagccccgcgccccccagccagcagtccctgtacaagcgggtggccgaggacttcggggaagaaccctggtctttcaggtagagcactggggtccttcctggcactggggtggcactggggtccttcctggcaactcaccagagacaccaacctagacctcagggcatctgggtattgcaggcagcagctcctgccctcgaagccccagagctggcaggtgctgggggccagtgcttggggcgtggggactcagagggagcaggtgatgcagtttgagcctgctgctgcttatgctttgcagcagctgcctggagatcccggagggagacccgggagccctgccgggagctaaggcaggcgacccacacctggattatgagctcctagacacggcaggtgagcacgcccaaccctgaacctccacagcagtccacctcccctgggcagagcagggagctgatgagaaagccggggcctctctccagggaaagggcagatagaagcagagctcaacttctgccctgggccttgaccttggcctcgaccttgcactttgggaaagtcccgcctgccagccagcgtaagccaaaggccggctgcgctctgtctgctggtgtccttgtgtttttccctagagccaggggagttgtgtctgatccacgccctgctcagcacccagccccctgctctgatctgtaacgcttgggcttcccagtggtttcagaaggcagcaggcagggtggcttagtggtgccaggctgaggcgaggcacagcgtgacatctacctgcggggagcatctctcctctcaggcgctggccctgaggcctcgcgcttctcctgtagctcatttctgtttgtgattggaccggccctctctgcttcccaagtccatgggcccgtcatgggtgggtgccttaatcctttccacctcggcgcgaccggctcccagccttgggccttgcacacagtaggtgctttgctccccatttggaattcaccccatggccaccagggggcgcaagtgccctgcgctgcccctgtgccttctgtgggtcgcagaatcagaaatcttcatctttggggactcatacacgtttttatttataatcgtgataaatcgagagagaccacccaaggcatatctaaattagatgtgagatgagaagaggggcttattcctctttatttttcctctgtgaggattctgcgtaatgccctggttgcatatacttttagtggaattgacctcaaatacatccagagtacacagctcatttcattggctttgaatgtgatcccaatgggtttttgcctgtgagccaggcctagggaactctcaggtctctgctggccctggctctgctgtgtggttcacagagtgagacttgcagccgtcgaccctggcaggctgctccctggttcgggggctcacaggctgtacagtaaaatgctagagcttgggagaccctggggagcctctagtcctaggattgacaactcagagacctgccaccaccagctgggaagcagaggagtctggggtaaggagcaggcagctgctggccagtgccagtgattgcggccacacagaaatgcaggcctgtgtggaaatgcaggccagtgtggaaatgcaggccagtgtggaaatgccgtgtagtacagtagtgcaggtctgggtagaaatgcaggtccatgtttgggaggtcaaggtgggcggatcatgagctcaagagatcgagaccatcttggccaacatggtgaaacctcgtctctactaaaaatacaaaagtcagctgggcatggtggcacacacctgtagtcccagttagtcaggaggctgaggcaggagaatcacttgaacctgggaggtggaggttgcagtgagccaagatcgcaccactgcactccagcctggcgacagagcgagactcagtctcaacaacaataacaacaacaacaaaagaaatacagatccatgtagaaaggcaggccagggccgggtgtggtggctcatgcctgtaatcccagcactttgggaggccaaagtgggtggatcatgaggtcaggagttcgagaccagcctggtcaacatggtgaactcccgtatctactaaaaatacaaaaattatctgggcgtggtggcacatgcctctagtcccagctactcaggaggctgaggcagaagaattgcttgaacccgggaggcggaggttgcagtgagctgagatcacggcactgtactccagcctgggcgacagagtgagactctgtctcaaaaaaaaaaaaaagaaagaaagaaagaaagaaagacaggccagtgcagtgcaggcccacgcagacatggaggtcaatgcagtaatgcaggccagtcctgaaatgcaggtccatgcagaaatacaggtcagtgcggaaatgcagccccagggttacagcagatattttttcaagtgaagccagaaatccagattttaggtgaaacctccctgtctttcaaatgttggcaactcattcaaatatcacaaaatagcatgtggtggtcagaccctcccagttgcagctcctcactagttacagtgattttaggaaagatgaaatcaaggtcccaagcattgaggaaggggtggaggaagagaaagttcagcctcagcacaaaggatggaacaggcagtggggcctgaggctgagggagaaggggctgaggttacaggaggttacaggacgccccatcagcagtggggtgaccaagatctgtgaagaaggggctgaggttacaggaggttacaggacgccccatcagcagtggggtgaccaagatctgtgagctcttggcttcctcccagaccttccgcagctggaaagcagcctgcagccagtctcccctggaaggcttgatgtctcggagaggtaagcagcaggtgggaatcctccgaggctggctggggaaccagggccagggagtggcagagcagagggtgagtgtcctattaccaatgggaggcaacagcctttccaagcacatggggccatggagggggaggagaattccagaacactggggccagagggaagcaatggggaggtggccttgccggctctcctgctctgggcagtgcacaagccggtcgtctcccggcctgcagcggcgtcctcatgcggcggaggccagcccgcaggatcctgagccaggtcaccatgctggcgttccagggggatgcattgctggagcagatcagcgtcatcggcgggaacctcacgggcatcttcatccaccgggtcaccccgggctcggcggcggaccagatggccttgcgcccgggcacccagattgtgatggtgagccgtgcgaggcccctcctgtcccccgggctcctcatggggacagtggcagcgggtggggtgacccaggcagacttcacctcccccagacgatgcagatccactctgggctgggcctctgctctttcctgggctgacgtaaagcgttctgctcatttatagatgagagtcgtgccgtgcagaacccagcatgtcacccgtggtgctgctgccatgcggcgcttctgaccaggggtctttgcatgaggccccttgacagggctgctctgggtggtcactttgggtgtgtacagtaaaatacacgtgacataaaattcactattttaaccactggggcatttcttttctttctttttttttgtttgttgttttgaaacagggtctcactctgtcacccaggctagagtgctgcggtgcgatcacagctcactgcagcctcgacctccccaggctcgattgatcctcccacctcagcctcttaagtagctgggaccagaccacaagcatgcgctaccgtgcccggctaatttggggacattttctaaaacttttttttgttgttgttacgaaacgcacaaaactgctgagaagataaatggacacaaatatacaacctggccaggtgtggtggctcacgcctgtaatcccagcagaaggctgaggcaggcagatcacttgaggtcagaagttcaagaccagcctggccaacacggcgaaaccccgtctctactaaaaatgcaaaaattagccaggtgtggtggtgggcgcctgcatggtcagggggtgactttgatgtggcctaaaagcagaattattaaactttaggaaaaaaaaaaacttctgggcacagtggtacatgcctgtagtcctagctactcagatgcctgagcccaggagattgaggctgcaatgagctaagattgcaccactgcactcgagcctgggtgacagagcaaagccttgtctcaaaaaaaaaaaaaaaaaaaagaaaagaaaaaaaaaggccaggcacggtggcttatgcctgtaatcccagcactttgggaggctggagcaggcagatcacctgaggttaggagtttgagaccagcctggacaacatggtgaaaccccgtttctactaaaaatacaaaaaaaaaaaaaaaatagctggtatctataatcccagctactcaggaggctgaggcaggagaatcacttgaacctgggaggcggaggttgcagtgagctgagatggtgccactgcactccagcctgggtgacagagtgagactcggtctcaaaaaagaaaaaaagaaaagaaaaaggaaagcacagtgctttcttaatatgaaaaaaattttaaaccaagaaatgtgcaagatgggcttcacctcattccagaggctcaccctgcggcctccaggaggggactggggatgggggctctggggtgggaaggtgagcacagaggcggggagaggatgcgtctgaacccctcaggcaggagtgttccatgcacccctcactgcccccttggaacaggctgtccaaatgctgagctcccctagggctccaatgatagcacatggagcacctaattcaagcgtccttcacgtcctccacatgacccgggaagcctttctttacatgtcatttttttttttttttttttttttttgagacagagtcttgctctgtcgcccaggctggagtgcagtggctcgatcttggcccactgcaacctccaccccctgggttcaagcgattctcttgcctcagcctcccatgtagctgggattacaggtgcccgccaccacacccggctaacttttgtatttttagtagagacagggcttcaccatgttggccaggctgatctcgaactcctgacctcaagtgatccacccacctcagcctcctaaagtgctgggattacaggcatcagccaccatgcccagcccttctttacatttctagttgtcctcttaagcagcagtccccaacctttttggcaccagagaccggcttcatggaagacaacttttccacagaccgggttgtgggggatggttttgggatgattcaagcacgttacattgattgtacactttatttctattattattacactgtaatatgtaatgaaagaatcatacactgaaccataattcagaatcagtgggagccctgagcttgttttcctgcaactagacggtcccatctgggggtgatgggagacggtaacagatcatcaggaattagattctcataaggagcgtgaaacctagatccctcacttgcacagttcacgatagggctcatgctcctctgagaatctactgctgtgctgagctgacaggaggtggagctgaggccgtaatgctcacttgcccaccacgcccctcctgctgtgtgacccgggtcctgatggaccatggaccagtaccagtatgtggcccaggggttggggaaccctgctcttaaggttcccaattatcagctctgaggtagttcaagcaacagagccccttgacgatgttcagggagatagtcccgatatcctaagggggccaattagattctaatggtgttaaaacacatcttaatttttattgtaaaaatatctactctcctaagcttagaacaatattgagaagaaatgaagtggatggtggaagccctggggggtgggccttcacagtggggaaggctgtgggtggagagccagggcatcgggtaggtgaaggccagggatgccactcagcatcctgtagggcccggtatagcccgcagcagcacagaatgatcccaaggctaagaaacctctatctagaatgctcttgaatgttctagaaccgaggttctttcttttcttttcttttctttttcaagacaggaaagtgcttatcacaaagaacccccgatctcgactggggaagggttggcagttgactctctggccagcactatgtgtagcacgcatcactagaggtgtgaaggccccacagaggctctggtgtgtggctttgttttgaccaaggcgtgcaggcagtggtcctacggcagggctggcccgcgcctcgcctcagtgccctcagcgccttctgtcttctggctggattcagagtcccgggggaaagagactgaccttctcgacttgccctcaggttgattacgaagcctcagagcccttgttcaaggcagtcctggaggacacgaccctggaggaggccgtggggcttctcaggagggtggacggcttctgctgcctgtctgtgaaggtcaacacggacggtacacataccactcctctcgtgtgcacagctgcctggccagactccatgacccttaagtccctggtggttcttctgcacgcccagcagccagggacccccagagccaagagaggatcagccaggctgtgccccaggtccccaggaggcccccaagccagctggaaacctcccacccactgactccagtgccagagcagcttctgagactgggagggtccttccttctctcctactttaattttctgcaaccttcctcgcagaggctcgtatctgtggctcatctgtggctcatgtccccttttatcaggttataagaggctactccaggacctggaggccaaagtggcgacctcgggggactcattctacatccgggtcaacctggccatggagggcagggccaaaggggagctgcaggtgcattgcaacgaggtcctgcacgtcaccgacaccatgttccagggctgcggctgctggcatgcccaccgcgtgaactcttacaccatgaaggatactgccgcgcacggcaccatccccaactactccaggtgagcagctgcctcgagctcggtgcgtccccagagaggcccacagggaaatggcacccagcctgcctcggcttcctcctcctgcccagcaatagagggtgggcgtggtgagacccccctaaggagggaagcctgccaagatcactgctgaagatgttgtttctttgtgatggatgctttatatattgcaaatgaaatgttcattctagaacattctagatctgggtttcttagctctgggtttcttagctttggtaccatggacgtttggggctggatccccgtctgtggtggggccgtcctgggcactgcaggatatagagcagcatccctggccgccctacccaggatgccgggactactcccatgccccagctgtgacaaccagaaatgtctctataggttgccaagggtcccctggttctcctaggactgtcttggtcttagcactgaaagccccacttgcagggaagcccctcggtcctgggcaagcagggacagctggtcaccctccctggggagtgacattgccccctgccttgctccattgaaaaccactgctctaggccgagcatggtggctcacacctgtaatccaaacactttgggaggccgaggcgggtggatcatctgaggtcaggagttcgagaccagcctgggtaacctggtgaaaccctgtctctattaaaaatacaaaaaacttagctgggcgtggtggcaggtgcctgtaatcccagctactcaggaggctgaggcaggagaatcacttgaaccccggaggcagaggttgcagtgagccgggattgagccattgcactccagcctgggcgacagagtgagactctgtctcaaaaaaaaaaaaaaagaaaaggaaaccattgttctagatcagcctatgggaggctccaagtttcaagtgcacggaacgcacagtgctagaaagcaggagtgttgagctcagcacccccatcactcattgcaaactcaagtcccctggggatcggagccagcaggtccagggagaggcctggcactctgcatttctaacagctctctcggtgactccaggctgcaggccagggacccaccatgaatattgaggtcctggagtggggccctgtacgctggctgctcaacagcaccccctgggtcccgccccaggacaagtaaatcagcatctccaggggtgggccgaggccctggagtcttttgaaagctctggagactggcatggccgccaggatggagcgctccagcctgcagcaaagggatgtgtggagctctaggtggaggcccttctctcccacccggccatctcccccactctcccctgctcggctctcccctgccctgctcacctggcaggaggcagctgggtcagggcctctgctggtctctgcagggctcagcagcagctcatagccctcatccaggacatgactcagcagtgcaccgtgacccgcaaggtgaggctccagggaggggcctggaccccactggggtgggctggaagaggggctcggtgctggcagggtggcaggaggcactgtgtggagagtgggctgctgattggagggtaaccccacctgtctctcctctgcaccccttcaaaccagggcagggtctgcagcccctgcccagcctgcaggctcttgcacaagtgcagacacacctcaggctgttctcagagcatctgcgcctctgcatcactcccaggtcgccctagtgccaatcatctcccctgaattcccattcctgttgatggcttcaacagctcctcctcatcctttctctgtccctcctttagccatcttctgggggaccacagaagctggtccgcatcgtcagtatggacaaagccaaggccagccctctgcgtttgtcctttgacaggggccagttggaccccagcaggatggagggtgaggcctggtgagctggcacaggggccactggctccaagtgggtgaggggctttgggagctgctgctagttggtcagctggggcagggggatgccactcatttaggccaggatctggtcttcaagaatcatggggctgggtgtggtggcgcacacctgtaatcccagatactcgggaggctgaggcaggagaatcgcctgaacccgggaggcagaggtggcagtgagccgagatggtgccattgcactccagcctgggcaataagagcaaaactctgtctcaggaaaaaaaaaaaatttcaggagaggagtacaggacagagggagggctaggaccctgtgccctggaggatggctgaggagaagggtgccactctcccagatcctttggaaggaagaaaaccctggcttccgccatcctcccttgggcctataggaaacaggattaagttgcaggctgcaaagcagtccctggagagccacagagctgtgtaacccccgtgcaaaggagccgctcagccaggggctatggaactgggagtgagtcctgtgaccgctgagcctgtgcccctggaattctaggtgctggggctgctgcagtgagcaaagcagacccagtccctcccggggcagggtaggctggctgggggctgccgcagcctcacccaccctcaggatcctctcctccacaggctccagcacgtgcttctgggccgagagctgcctcaccctggtgccctataccctggtgcggccccatcgacccgcccggccccggcctgtgctcctcgtgcccagggcggttgggaagatcctgagcgagaaactgtgcctcctccaagggtttaagaagtgcctggcaggtatgctgttgcctgggaatccctctaccccttccaccttccctccctccctcctccccttcctccctccttcctccccttcctccctcctccttccctcccccaccacgcacattcccacactcacctgctgtgtccagatagttcaggatggaggtgcagggcacagagcggggtgtgcagggtcaggtttgtaaagtggacatcctaagaagagcttctcccagtgctggcagggttcacggggacaggggtgtttaccatgggactcccccagacccccacacagctggtctatgatggccccgtccaatgtcacctgtagagtacttgagccaggaggagtatgaggcctggagccagagaggggacatcatccaggagggagaggtgtccgggggccgctgctgggtgacccgccatgctgtggagtccctcatggaaaaggtgaggtcaagggcggggtgggcaggggagctgtcctgggaagggtttcaggaatgcagaggagggggatgagataaaggtacagggaccgacctgagacctgggtgaccttgtcgccgacctctgggtcccaacagcccagcaggagcccaaaactcatctcagccagttaggatccacgtgactgtgggtgaggtctcccaactccttgaatctcagtttcctcagcttgggggatgtttaatagatatttgttcgagaatgaataaatccgagctaacaacactctccacgtttgaaggcgcaaacgcgtgaaaagcagctccccgtgaaccacagctttgtgtctgcacaggcacgggaagccgagtctggcatctgcgtgcctcctgtaggggctggcggagctccatgccaagttcacctcatccccagagctcacaatttctagattttcccagtgaaaaatcaaagggatggaaactcttaatactgcatagcacacagcctcatttagaaagtggcaaactcagctgggcctggggctcacgcctgtcatcccagcactttgggaacccgaggtgggaggatcgcttgagcccaggagttcaagaccagcctgagcaacacagtgagacccgtctctaaaaaaaattaaaaaataaaaagagaagaaagtagccgggcacagtggctcgcgcctgtaatccccacactttgggaggcctaggcgggaagattgcttgagcccaggaatttgagaccagcctgagcaacacagtgagacacccgtctctacaaaacatttaaaagctaaaaaaattaaaagtgggccgggtgcggtggctcacgcctctaatcccagcactttgggaggccgaggcgggcagatcacctgaggtcaggagatcaagaccatcctggctaacacggtgaaaccctgtctctactaaaaacagaaaaaattagccaggcgtggtggtgggcgcctgtagtcccagctactcgggaggctgagacaggagaatggcatgaacctgggaggcagagcttgcagtgagccgagatcgcgccactgcactccagcctgggcgacagagcgagactccgtctcaaaaaaataaaaaataaaaataaaaaaaagagagaagaaagtggcaagctctattccctcatctcctctacaaaattcagctctgcccagctcctgccctgccctcagcctgtccggagggcccttctgacctgggcgttggctccctttgcttcctctgaggcctgtgatcttgactcacttcttctctccctcccacaaagaacacccatgccctcctggacgtccagctggacagtgtctgcaccctgcacaggatggacatcttccccatcgtcatccacgtctctgtcaacgagaagatggcaaagaagctcaagtaggtgcacgctgggggctgggcaggggcttcgaagcggctcctgggctcccccaaagcccacggcaggtgcctctggagtgtgctctgcggtttgcaggaagctgaggcgctgacagggccgtttccgcacaactttgggacaagggccccgctgattgctcatgagattcccctgattttggccgggcgtggtggctcacgcctgtaatcccagcactttgggaggccagggtgggcagattgcttgaggtcagcagttcgagaccagcctggccaacatggagaaaccctgtctctattaaaaatacaaaaactagccaggtgtggcggcgggcgcctgtaatcccagctactcgggaggctgagacatgataattacttgaactgggaggtggagttgcggtgagccaagatcgcgccactgcactccagcctgggtgacagagcgagactctgtctcaacaaaacaaaacaacaacaacaacaactgctctgatttcacgcttaccaaacaaacttgatttcaaatctggcctctccagaatcttgataccaggatgacggtgccttttacagtgggcaaaagtagcctagtcactggaaaatgacattttataattgaaatttaaagttgtaaattaacaaattggcactccctcccccaagagcagctcagaggaccattgtaaggccagaaccccacccggcctcagctccactgaccctccacttactggtgcttggctagcacaatctaatccttgtcggctaaggacaaaaaaaaaaaaagtaaaaaaattacttggtttcctggggacagaccaagatgtcctgctactgtgccctttctactccaggaagcaaggctgtgttctagacaacctgcctcccaccactggggcctggggcctattttctttacaaggtcccctcaaagcgaggccacctgtgtttaggggtgtttgggtgcatgtcatcactaccctagccagggctcctgggcccttgctctcccctgagcccgccccccccaactctggcctgtgcaggaagggcctacagcggttgggcacctcagaggagcagctcctggaggctgcgaggcaggaggagggagacctggaccgggcgccctgtctatacagcagcctggctcctgacggctggagcgacctggacggcctgctcagctgtgtccgccaggccatcgccgacgagcagaagaaggtggtgtggacggagcagagcccccgatgatgcaccgtgccccttcccgggactgtgggggcttctgtgtgcctgttaatgcagtcctgttcctcagcccaggccctcttggcacagctgtgggctccttggcacatgaggccggctctccccactggctggggtctaaccttgaaccctcaccacgtgcaggtcacacacagtgaagccacttgtaactgcacacttttctgtggaaacatcttcaccctttaccaggcttggcatggtctgaactggaaaccctgagaatgtttctgcagtgggacaggagggacgtcttcccatgccttccctagaaccggaggccccggacttctctggaaaaccgcctgtctgcaggcccgattcaaatctatgggggctgcacttcccttttacattttgatgtgtcaaaggcttttggagtgaccaaaagcacagaggcagcgggtggggcgcctgggtggtccccaaggtcgctgccacccttgcccggggcagaggcagaagcccacatatgctgtgacgctggccaccttttctcagcttctgaggctgcgatgcctcaggaactccagtttacagagaccagtgtgtttacttgtaaataaagcctctgcgtggtggagacggtactttcagtgggtctgtgccccgtggcccctgtgcctgttcggtgggggtgtcccagagaagcctggcaccagtacccccgtacaaggcccagcggactctgccttcccctgacctggctttgcaccccagcccttcttgggccaaacatctttactccaccttcagggctcggggaggacccaggtccgccagcacctggccttgcccctgcctcctggggctgttgcagactgaatgtcattttgacagcagtgtccaagaatcaggaagctgttctagaattcaggttggtatcatcataaatgagttcagaaaaagaacttctgtatattttactaaaataaaaagcttttacaatagctggcctgtggcctcctccagcccaccccagtatggagtgatagggagggaagggcaaggggagcccacctactcaaggaagcgccctctccttcgaggggtgtccaggccgaggggtgtccaggccgggcttctgctcccgaggtgggtggaggcagggcaggaacggcacattctcccagcaacgccgacgtcatccaagaattaacccaagccagaggacgggcatcgccacccagcaacgccagtgtcaccgaagaattaacccaaggcagaggatgggcattgccacccagcaacgccagtgtcaccgaagaattaacccaagccagaggacgggcatcaccacccagcaatgccagtgtcaccgaagaattaacccaagccagaggacgggcatcgccatgccttcatcttcggacactctcaaaaaagataagcttctgcccagaaacaccacaggttcaagctcatcactcagggagcctgctgccaatcagctgaaacctgcctggggaacagggacttgaccatggggcaaaacagaagaagcagaaacctgcccaaaggtcgctcaaaggcttcctctaggccagacgctggtaagagccaggcgccgtgctcccaggtgagtgtcggtgggacctgcgtactgcccacgcggcaccgaagcccctgcctgctctctgtgaagggttcagaagtatctgtggctgccaaagcctgaagagggcctcaggcctcccatttgcaggtccccaaaccaagccagaaaacaagactcccttgtcatgggctgggggcgctgccctgtccgcagaccacgtatgtctagaattcccgtgctgggacatggttcagacacaaggacaactgtgtcccctgccatgacggcagtgcccctggtggtggaggggctgggcacatgctctggtcacatgctctggtccccctccaggcaatggcaagagtgaccccacaggaaggaagaaccctccttggatgggagtgtggacggaagggctgttgccactactccccaggctggccggccacacggacacgtgtgggatgtgtctgggacatgcctgggatgtgtgcacaggcctcctgggatggtcacagctcattgtggaggggctggcactggggagagagcttctcctccaggacgccgtcgggggcgcacacccaggggtcgtgggtctcccactgccacttggccagctggtcccgaagcatctccagaagctgagcaaagcgcgggtcggtggccaggttctgggtctcgtgggggtcccggctccggtcgtagagctcccagcgcgcccggtagtagtaatgacggaggtccttgtaccagcccgtgggctgaccagctgtggtgcggttcaggaggtcctggaaggtgggtgagacgtagaagtcctggtcgatgggaaagggcatcttgaagttgaggttgtgcacgaggcggaagtgccggtgctgcacggagcgcatggggtaggacatggtgacctcgtggtggctctggctgccaaagacggtggcccagaggggctcggcctccagcgccggcaggagggaccggccagtgaggtggatggtcttcgagccaaagatggcgtagctggggtacgggatcgagaaccaatccaagatggtgggcgtgaggtctggaagggacgcggcatctcagagcagcagagccctcagcacacaggagctgccctcggaagggccgaacctacgccactctgggcggctcccttctccaatccaatcagcagcgggaggtgccttgtcgagccgacacctctcaccgccacgtcatctctctgggcctcagtgccttgaatggtataacaagaggccctgattcggtgacatttaggatccttctaaaatcccatggactggaaaagaagtctcctttttggtagctcgtgtactccagcccctgtggtgggtgtggccacagtgctcctggctcatcatttggggccagagagagatgtgggccccaagagagatgtgggccgcgagctcggagggaaagggaacctgagtttcctgctgtcccgggcccaccccacctggaggctctgccaggcagtgggcaggacacacgagcctctgccctgtgccgaaggggtcaccccgagcccctcacaaagtcttcctgcacccgtgtctttgtctgcacatccataacatgggactagatgtcctaggtctttttaggaatgagcagggtcatgaggtgctttgggtcccccaggaaggcaggatggggtgcacggatgctcagagaggggtccccaggcccacagtatcggcatcacctgggaacttgtcagacatgcaaattcttgagcccgccaagatctactgaatcggacaccctgggatttgcaatttggatattaacaagcatcccaggtgattctgaagctcatcggaggtaggcggggaaaaggcaatggttttgaaagcagcaggatccaggcgagaatcctagcttagtgcttaccagctgtgcaatcctgagcagcttacttcacctctctgagcctcattcttttcctctgtagagtgggagtgacagtcccttcctcacccagatgatatgagagccacattaggtaatgggtgtggagcagcatctgacaggtcatggccccgtcccagatccactcccacacctttcctgacggagacagacaaaggcatacctaggaggctcacgtaggcctcgctgacttggccccagcgttttgggtgctccggggatgacaccagtaagggttcagcagtgcccggccagtacaggttggtcctgccgctggggaaggggatcccgttgtcggacgtgaagatcaccagtgtgtcgttcaggacaccggcgtcacgcagctcctggagcaccagtccaactcctgtggtgaggggccgagaagcagagctcagccgcagacacggagggaggcagcgggtggtgtgtgtagacccacctgctgctgcatccggccgctgggctccagcgctttccggattcgaaagcaccctgtagttcttcccaatggccctggctcttgcccagctcttgcccagctccgcccagctcccattccctgagcaggcctcgaatgggcctccagggactccagccatcccttggcacttctgtgtcacccccaggcagctgctccctggtgcccgccggcttttgagttctccggaatctcgtgtctgtcccatggagcaaatagggcaggggccagaggacgaggcttcctctatactcgctccttcccagctggggccagaggacaaggcttcctctatacccgctccttcccagctcactaagaattaatggcaccaatagggaaatggcaaaggtcctgacctcctgtcgtccctgaccccaaaagacatgtgtgctggaatctgtgaaggggttcttgtttggaaaggggaacttcacgaataaagatcttgggacaaaatcatcctgaagtgctcaggtaggccctaaacccgacggggtccttataagaagcggaaacaggccgggcgcggtgcctcacacctgtaatcccagcactttgggaggctgaggtgggcggatcacgaggtcaggagttcaagaccagcctggccaatgtggtgaaaccccgtctctactaaaaatataaaaattagctgggcatggtggcgtgcggtgcgattgcagtcctagctactttggaggctgagacagaaaaatcgctcgaacctgggaggtggtggttgtagtgagccgagattgcgccactgcactcccgcgtgggtgacagagcaagactcagtctcaaaaaaaaaaaaaaagaagaagtggagacacaaagaggagacacaggaaaaaaggccatgtgaaggcttcagcggggatgggggcgattctgccgccagcccaggaacgcccagcactggcacagcccccagaagttggaagaggaaaggcagggtctcccctaggccttcaggggagcatggccctgctgacaccttgatttcaaacttctggcctcctgaactgtgggagtacaaattttggttgctgtaagccatcaaccacaaaaaactcacagacctcaagatctccatctgcatatgctaaggaactccaaacccccaaatctgacccaggtcctgtgactggaaatatctgaagtcttcacgcaacctctggggcacccgaaggccccagcccaggagcaggtccacatcagggcagccccggggttgggtcctgatgccacccacaggcccctcctctcaatgtgggctctgccagctgcagcacagggcctgccacactgggaccctcacccacattatgccgtgacctaagagggcgctggcccaggatgggggaccccggccgtggcaccccctccagtgcccggttctgcaagcccaccttggtccatgcggccgacggtggtgtactgagcggccaggtcggctcgggctgccggggtgttggggacgaagtaaggcacctggggcaggcggtggggagccaggcttagaacagacagaccgggggagcggtgtccagccttctccccggggcctcctgcaaatgggttagcccagaacagcctcactccggaccaccccgtctctctacggttctctctgtggccccgaggttgggaacctgaatccgatttggtcagagcctctttcttcatcatctagggccagggctgcaagctcgtaggaggccagggtccccgacccagggctgacgggcgtcctgaaacacaggaggggccgtcctaccagcacgtccagtgggtcgtaggcctggggggtccagtctgggatacgacccatgccgctctctccgttgccaaacttctcacagaaggttccgtactggggctgggagtgcccacagcggtgggggtcgtggaaggcgacgtagaggaagaaaggcctgcacgggaggaggctcattgccaaggctgcggggccactgccacgtggcacaggaagcccctcggctctgcctcctcctctgtatctggaagtcaacctgtgaccctcactgcctcagtttccccacgtcccttctccctctgaccaggctaactcgagtacctggaaccttctcccctgcccccattcgagccacgtgggggcccatgcatcccgccggaagactccgggctgtgctctggtaccggccgccagggggaaggggcaggggccccgactcataccggtcatcctgagtctgcaggaatttccggacgagcagcttaattctagtgatgttccgccccacctggaggacggagccattctcctccgtgtacgcaaagtcaaacgggtacacggtctccggccccacgtgcttcttcccgatgatgcctgggcgggaagagaggcctggccagagtcccttcagcctcccaaccctttctgctcccttctctgcccctctcggccctaagcgcactgtgggttctcgtggacacacagcccagccaggagacccaggcccagatcctttgggacaagagctaagggcaggccacgggggctgagcgtgccttggtacaaggtgccgaacctcctgggctctggcctggcctctgtgcctcaccccacgccctgtcctcggcacggggtcctcacctgtgcgcacaccagcttggctgagcagcagcggcaggctccgcaccttgtcgaaggagttgaagtggtgcacgtcctggtgcagcccgtacatcccattctgatgctgccagcaaaggcgcatgaggtccggggcccccggacagccagagcccgcctgccgcacctgttctcccacggccctcccatccccaggggccttctcggggccctgatttagacttcgagtggccagcacccagagacactggctgtacctcccactccctgcccgataggcccatgggtccctcccgtgaaaggaggacttcgccagaaagaaggggacctgcagggcgtgcaccgacacgagggtggccttgatgttctttttgcgtatccgtacttttgaactcttctgttatgatcacacgttacagagtgaaaaagacagggtcaggccttgttttattacctagttattttatattgtaaaagatgtgtacattttaaaaactcagactgccggccgggcgtggtggctcacgcctgtaatcccggcactttgggaggccaacgcaggtggatcacgaggtcaggagatggagaccagcctggccaacatggtgaaacctcgtctctactaaaaatacaaaaattagctgggcgtggtggcgggcgcctgtagtcccagctactcgggaggccgaggtaggagaatggcttgaatctgggaggtggaggttgcagtgagccgagatcacaccactgcactccagcctgggcaacagagtgagactaaaagaacaagtgtccttaaacacccatgttcatagcagctttattcacaacagccaaagggtagcagcaacccaagtgcccactgacggatgaatatggagaagcaaaatacggggcccatccatccactggaatatgagtcagccctgaagaggagggaagttctgactcgtgctacagcatatggttaaccctgaggacattgtgctgagtgaagtaaggacacaaaaggggggccgggctcggtggctcacgcctgtaatcccagcactttgggaggtcgaggcgggcagatcacttgaggccaggagttcgaaaccagcctgaccaacatgatgaaaccccatctctactaaaaatacaaaaattagacaggcgtggtggcgcgcacctgtaatcccagctactcgggaggctgaggcaggagactcgctggaaccggggaggcagaggctgcagtgagccacgatcgcaccacagcactccagcctgggtgacagagtgagactccaactcaaaaaaaaaaaggactagtcctgtgtgattccactcttatgtggcccctggagcagtcagattcatagagacaggggatggggagggagaatgtggagctggtgtttcatgggacagagcttctgtttgggtagatggaaaagttctggagatggatggtggtgatggctgcataacactgtgaatgcacttaatgccccggaactgtgcgctgaaaaatggctaagatgggaatgttgatgtttgtgcattttaccacagtaaaataggagcatgtgtgccttaacggtgtccgctccctgcaccatggcgttcctgggacactgtggccatggcggttcacgctgagtgagcccaccaggcctcgcactaagtgtttacatacaaagcattagccccgccaatctccataactagagtggcatctcattacacccaccatcttacagatgaggaaactgaggcacaaggaggtaggtgacttgctcaaggccacacacagcagtgcagccagggctggcgggtgagtcggagcccctagtctgcactcacagccataggctgtgcctcctcctggaggtgggagggaaagtgggcaacaccccccgggatcccagggatgggagacgtggcagaggcctgggccccggacgcagcctgtctactccctgcccaccccctcctcccgccccttgcacctcacctggggcaggccagtgaggaggctggcgcggctgggagagcagctgctgaccgaggtgaaggcattgcgaaagaggaggctgcggcgggccaaggcgtccaggtgcggggtggcgatggcgctgttgttgtacgcgccactctcaaagcctccgtcatccgctgcgtgaggtgggagacagagagtgcacggtcggctgcggtcacgagaaacagcactgggagtgagggaggctgggactgtgatgccagaaggcgagacacccaggtgggcatggtactggctcagtgtgaacactcagcgcgaaatgctatcgtgacagagcactccattacctaggaggcatgacacccgagtgggtacatcaggcaagcatggtatcagagggcatgttagcaggtctcatacttggtgggtatgttagcaggcaggcatgtatccagaagaccccatacccactgggtatgttagcaagaaggcatggtacctagtaggcacaatacctggtgggtatatcagcaagcaggcagggtgcccaggcaggcctgatacccagtgggtatgttggcaggtgagcatggtatggaggctggactgattgatagatggtgggtatgttggcaggtgagcatggtatggaggctggactgatagatggtgggtataagcaggtaggcatggtacccaggcaggcctgataccagtgggtatgttagcaggtagactggtatccagcagggatgatgcgtggttggtatgttagcaggcaggcatggtatccaagtgggcatgataagcaggcatcataccacaataagcttgatgataccctaagcaggcatgatacccggtgggtatgttggcaggtgggcatggtacacaggctggactgatagctggtgggtataagcagatgggcatggtacccaggcaagcctggtacctgcataggcatgttagcaggcaggcatggtacccaagtgggcaagatactcatgcaggcatgatgacccaacaagcttgatgataccccagcaggcatgctacctgggtgggcgtgttagccggctaggcatttaggcagacagcggctgagcgcatggccacagaactgctgggcaattctgggctcagcggaaaccgcatggggcagagggcaggagagcctcgcccagggcgcgtctaaagctctatgtgtgtgcgtcccaccgctgcttctcactgatgccatctcaaaggcctagtgaccttgcaggttgtctatttcaaccctttcatcctacacaaagcagctgaggcccagaaaggtgaggtgcagtgcccagggccacacactgggcagcaggaaacagggacaggccgctgaactcctacaaccacaccaagcttcttccccctgctctggagtagaggacactgggggcaccacaggagaggctggtgggaacccccagaccaacactttccccagctccctcagaggcaatgtggtccatggatggacagaggaggctgggcaccttccagttgggcttccatcctccaccccacagtacccacaggtgtgagcacatggcagccacgtaaacctggagggagagcgggatgggctgtgctccgtacccgcaggccaggaagaaagctgcccttctccaaacccagagtgtctcggcacttggctgtgggcctgctatggtctgaactgtgtcctcccagaattcatatgctgaagccctaacgtcaacatcactgtatctggagacagggtccttaattaagggtaaatgaatcataaggatgagatcctgatctgacaggactgtggacttaaaggaaaagaaagagagggccgggtgcagtgtttcatgcccgtaagcccagcacccgggaggccaaggcaggaagattgcttgagcccaggagttcgagaccagtctgggcaacacagtgagaccttgtctctacaaaaaatacaaaaattagccaggcatggtgatgtgcacttgaggtcccagctacttgggaggctgaggcaggaggatcgcttgagcctgggagattgaggctgcagtgagctgtgattgtgctactgtgctccagcctgggtgacagagtgagaccctgtctcacaaaaaaaaaaaaaaaaaaaaaaaaaggaaagaaaggaaaaagaaaggaaaaggaagtgagaccacccccatccgcttgtcatgtgaggaaacagtgagagggtgaccacctgtaagccgaaagtggaccctcactggaacccaaccaagctggcaccctgaccttggattttcagcccacagaactgtgagaaatacatttctgtttaagccgatccatggcagtccgtgctaagaaaggccctagcccaggggccgcatagcctggactctgacagcctcctgtaggaattctgatccgcaggtgagggtccatgcagattctctgctgtgtttctgggaggcgaggagttggcaggagagctgtttatgttacagtgagccgaacccccgcccagagaccacaaaattaatcagaaagagggcaactggcagggcgccagacctcagaaggggaaagaatcgcaggccttgggtttggccttgtcacttgtcatgagccagagccttgattacctaaaccggaagtcttgtgagcagcacggtgcttgctctggaggaacctggggtttctgagagggactggggttgggggagacggtggtgggtgggtggtggagggctgtgcccttgggataagggaaaagacagctgagacacaggctctggggtcggaaatgagagccaggagggcaccctgtctgcagtctctggggaccggagcaccagcccctcctctgggatcccctcccaagagggatttgagatccgtggacccctgagccctggctgggcagggtcagaggagggtgggacaggcggcacgaggtaagtgtaggggtgctggatgctggggctcactcctccagcctttgctgccctctctggggagacacccgtgaagagtctgggggcggcacagagaggaggacgagagggaatggcagcgggggatacaagggcagggcacactagggtcagcattgaccacgggtggggaggaggccagtggccacttccccgggccaccgcaggtgggcgtgggggggcggcgccggcactcaccgaggagcagcagtgcgttccggggacgcgcccggcagagccccaggactagcagcagcgcgcagcaggcgggcacggggcagctcatggcggcggcggctcggactcgggatcgggatccggctccggctctctggtctcccgctcggccccgccccctgccccgaccccggtcacgtgcgcgccagaccccgccccggcctgtccccggcgattcctgcggacccagctgcggcgacgccaggagaccccaagctgcatcgccgagtgggtgagtccgtggcccgcgagggcggcgagcggggaccaggggcagggggagcggacagtggccggggtcgccgggggcagccgacgcgggggccagcgcggagtcctgaagtgcgggggcctcccgtggggaccactcccccgccgcgtccctacccgggtccccgcggccctcggccttgctcggggccaagggaccgcggacggtcaggtggcgcagggtctcctccggagaccccaggatccggagccagcggccttgtgggcggggccgggggccggggagtggattttgcccggagcggagcggccgggggcgtggggggctgggggtgagggtggcggctctgcgcgcgggcgccggggccctggaagatgctgcgcacctgaattaaccgggcgcctctgatgtcctcccagaagcaactagaactccagggctgtgaaagccacaggtgggggctgagcgaggcgtggcctcaggagcggaggacccccccactctccctcgagcgccgcagtccaccgtagcgggtggagcccgccttggtgcgcagttggaaaacctcggagccccgctggatctcctggctgccacccgcaccccccgccagcctacggtgcgcccgcgggcccagcttctctctgcgctgctccccgttaaattccctggggagacggaaaaaaaggcaaaggaagtcggttctccaggggccagaagtgttgagcctaattagtcttcagacttctcaatgaggaatcgcttatcagtttcttatctgggagagttgaggatggagggacagaaggcacccaggatttgcacgggggggattcagggagagagggtgatgagggacggggtgggccttccagtcttggcccagtccccatcttgcacacattgttggcttcctcttagagccgttcgcccccctggggaggggagacccatagtgacctctcctgacacccgccgaccctgaccagtgttgccgggttcttcaaaggccacgctctgactgctggtctgtgtcacctgcaccccccagccccaccgtagagatgccttcttcggtgacggcgctgggtcaggccaggtcctctggccccgggatggccccgagcgcctgctgctgctcccctgcggccctgcagaggaggctgcccatcctggcgtggctgcccagctactccctgcagtggctgaagatggatttcgtcgccggcctctcagttggcctcactgccattccccaggcgctggcctatgctgaagtggctggactcccgccccaggtgaggcgtctgaccctgctgccagccatatctcagaaacagtgcagaatacacagtatcaatcccagacaccatcagcgattccaggtttccagcccctgggccccaaggaacctttggtttacagtgtgtgacgcagattgtctctgggccgacccaggctcctatgcctgtttggcacacacagacactgagctggttatggaggggccagcgagatgactcatggaggcctcaggagttcaagaccagcccgaccaaaatggtgaaaccccgtctccactaaaaatacaaaaattaggctgggtgcggtggctcaagcctgtaatcccagcactttgggaggccgaggcaggcggatcgcaaggtcaggagatggagaccatcctggctaacagggtgaaaccccgtctctactaaaaatacaaaaaattagccaggtgtggtggcgggtgcctgtagtcccagctacctgggaggctgaggcaggagaatggcgtgaacccgggaggcggagcttgcagtgagccgagactgtgccactgccctccagcctgggcgacagagcgagactccatctcaaaaaaaaaaaaaaagaatgcttcctcagacttggacacagcacacgggcctgcaccgacccctctgcctggctgtctgcaccctgaggccccagttgagtgctgctaaaaaagtggcctcctgatcactgcaggtccacccacagggcagggcggtgcacctttaacctgggcctggacacagctgacacccacacatcccgagcttggacacgcacactagggagctggtggatgggcctcggcctcctgagtgctcaccaccctctctccccacagtatggcctctactctgccttcatgggctgcttcgtgtatttcttcctgggcacctcccgggatgtgactctgggccccaccgccattatgtccctcctggtctccttctacaccttccatgagcccgcctacgctgtgctgctggccttcctgtccggctgcatccagctggccatgggggtcctgcgtttgggtgaggctctaccttcttgccaaggggatgccctcgacctcagcatttgcttgtttgcatttcaagtctatccccgtgtgcgtgtgtgtgcgtgttggggtgtgggtatgtatgtgtgtgtgtgtaggtgggtgggtggtggagggggtggggcacttggctcttagtctactcttttctgcttagaggccaggacacttggagaagtgcctgtggcctcagaccccagtctcccttttctgctctccaaaaacagccaaacagggtgtgttacccccagtccttagctgcggtatctgctccccaatcccacccattgccaccttccccagctcacatctcccctcatcctctgggactgggtggagccgggaccagctcgatgtcccctcttggctggccagggttcctgctggacttcatttcctaccccgtcattaaaggcttcacctctgctgctgccgtcaccatcggctttggacagatcaaggtaggcacggcgcccacccagggcactgctctttggccactgctcgttggcacagggatggcgggagcaggactgaggccagtcctgatccctgtggccagtggacgtcttgctgtttcagattgtcttccatgggtcaagaagcacgcggtgctctcatgggtcccctgttaataaaatgaccctcctgggagggatgtcacgtgatggttggatttcacagcgggtaacttgggggccggtaattccatccccctgctcttgcccgagtttccgtgccagtgtgcttggctggctctgtgacgtggctctgttctccctgcactgggcacacccagcaggccccaccagtcatgagcatgctgctagaatttctataggcaaattatttccccatgccaatttagttagatggttttgttttgtgcttttttttctggtttctgtttaatattttttaaatgccatgccttttatattttcttttaaaacatttataataagtactaaaatcagtcatcagctgagggtgtaatttattctgtttttgctgggttgtaagttcctcgagggtaggaactgtccttctcccagccatggccgcccagcattgggctggtgcagtaggggggtgctcagtggggtgtgtgtggagtgaagtgagcccaattccacagatgggaccatgcggccctcatggcagactagggtcacatgctgcctcctgaccctgtgtcactgcaggtcatcttccccaagccaggccctgttccaggctggcctgagacagtcttccctgatggaggtaccatgagaagaccaaggacaggagagtgtgtgtgagagtgtgtatgagtgtgtgtgagtgtgtgaatgagtgagtgtgtgagagtgtgagtgggtttgagggagtgtgtgagtgtgtgcgtgtgtgagtgagtgcgtgtgtgagtgagtgtgcgtgtgtgtgtgagagagtgtgagtgtgtatgagtgagagtgtgagagtgggtgtgggtgtgagggagtgtgagtgcgcgcgcgcgtgtgtgagtgtatgagtgtgagagtgagtgtgagtgagtgagagtgggtgtgggtgtgagagtgtgagtgtgagagtgtgagtgtgtgagtgtgagaataaagtagacactttttgcactcttgctacgtgcgaggcactgggcaggacactctccatgtgtaattctcaacacaccccgggaggtagatttatcattatttccatttgagagaggagggaccaacttaggtgtgggtgagcgtgatttgtacgttatctacacgcatctctcagggttagcttggcaaatgctgtttcagggcatggttggttctttaatctggaaacatcatttttggtgtcaagaatgttcttttgtaggatcccagtgagagtggagagcggagagtggagagtggaaggcatcccttgttcatgccttcatacttggcaaccctagccccgcccagggactctgcagccatctggggggaggggcgtcctcctgacaggcccaggacagaagaccctaccccaacagtcccagagtccgccccccaggatgtcctaaccccacccaccctgtgcgcagcagttttagggcagggtccttgagcctgtggccatgggatccagggcctcaactttcccctctgactcctgttgggtctcaggcgatgtaaagaactaaagtgcaagctgtgcctgcactgtggatcccagctacgtgggaggccgaggtgggaggatcactggagcccaggagttcgaatccagcctgggccacagagcaagcaagacccccaccccccaaccccccgccgctctctaaagaaaaaaaaactaaactaaaacacaggatagagtgccttctcctgcccaggacctcagagctggtatcgtggtgggaggctcctactttgccgaggattccccaagctggtttcttgaagcccctcagagccctccacatctgcacactacgaagagatttttcctcccgcagcagcggagctggggggtggcggggcacctagtgagggagacattctcaagccaatggcagcaagggtctacactgcagggggcctggctgctgagtggcctggagccaatgggggtggggccaggcagcccatggcccctggccatcaagctgtagaacctgtctgcctgctgtggggtcacctacattgttttttatgagaaaagtaatttagagaaaaacatatcactgacccagtaattgtgaagtactgtctcccacgagggtagctttgatctcctgccctagggggcgttgggagtgggcaggtggacccctgagcccctaagatgggccccgggaataagggttgggagcagggccgggggacactgtctcagccctaggggaggtgggcggggagctggggacagatggccttggtttgggagcatagcctctgatcagcatctctgtgtttggacagaacctgctgggactacagaacatccccaggccgttcttcctgcaggtgtaccacaccttcctcaggattgcagagaccaggtaccccgggctttgttcctccctcctataaggaagctccttcttccacacctcctctcccggcccccacctcagtttccccacccctggtgactgctcaaacaggggtccccagagcagccccatcagcagcacctgcaagctggcaagaaatgagactctcagtcctttgcagacctgccctatcagagccacagttttaacaggaggccggtggtctgcgcgcaggggagagttcaagaagctctgctctggggagctggagcagggcaatgttcctctctccacaaagctttcttgggggacaggaatggggagagtctgtgtaaagaaaaagaaggcagtgtgtctcccccaggctgtgatttgttaaggaggagaacacagggcgtggggagctaacccagacagaacgcaggtggtgcagggacggcaggtggagctgtgatgagagatgaggcgacccaagcacttccctcaggtggtttaaagagcctctgatggccggacactgtggctcacacctgtaatcccagcactttgggaagcccaggtgggcagatcatcttaggtcaggagttcaagaccagcctggtcaacatggtgaaactccgtctctactaaaaatacaaaaattagtcgggtgtgatggtgcgtgcctgtagtcccagctgttcaggaggctgaggcaggaggattgcttgaacctgtgaggcggaggttgcagtgagctgagatcacgccactgcactccagcccgggtgatagagtgagactccatctccgccctgccctgcccccccgaaaagaaaagcctctgatgaggggtacctccctgccagaccatccagcgggaaggcaggatgcctctctacctctctggctggaaggggctggaggaggaaatgatctaggggagctatagagatggctgcccagtgctgtggcctggagggagtgggggcgatcctggaccatcttcccctcccctctgatctgctgccgaagcttcccagcagctgaacccagctggaagccagtgggttctttgctcttcagaggcaccagtgggcaggggtcggccagatgggggagcagtgattacggagcctgaccagtcagagagcgtcacgggctgtcatgtaaaaggggccttactgaccgtttagtcctaagccttctagaatgtctagagcagggtgtccagtcttttgtcttccctgggccacacaggaagaattgtcttaaaatacactaatgatagctgatgagctacaaaaaaatcattgaaagaactcataatgttttaagaaagtttacaaatttgtgttgggccacattcaaagccatcccaggctgcacatggcccacaggctgtgggtttggcagacttgttctagagccacctgcagagagcatcagctgctcaggctggtccccattccctgtggtcactcaccagatcctgttccatagacttgagtcccagagagctacgggagtgaaaatgtgagcacgtcgctctgccatcatcatgacccgggcctctccactgcctgtcctgcccaagcctgtgtacttactgaattttgaattgagttttgaagtagaacagggatgcatattgcttaggagaaaacatctcagcctagtctgtgtttggtcttgcagagtagcttgctaaagttcctgagctttagttaagtgtctgtgaaatggtgaaaatattgaaaatgctttatttccttgtgatactcactgtggtctgggaccagcagcctgggcattgggcctccctgggagcttcttagtgcctctcagcttaagcagcagcaggatgcttgagtcagcagtaggcctgggccgagctgggtggtgaccagtcctctgcctgtccacagggtaggtgacgccgtcctggggctggtctgcatgctgctgctgctggtgctgaagctgatgcgggaccacgtgcctcccgtccaccccgagatgccccctggtgtgcggctcagccgtgggctggtctgggctgccacgacaggtgaggggcctctggctgacatcttatgcaaccttggctgcaggttggggtcacttggggagtcctagtcccaccctagggattctcacgtcattggtctgggtgtcacttgagcattgggacatttaaaacaccacaccaaactctgggacatgtactttttatttaattaattaattaattattttttgagacagagtttcgctctgtcgcccaggctggagtacagtggtgtgatattggctcactgcaacctccgcctcccaggttcatgtgattctcctgcctcagcctcctgagtagctgggattacaggcgcatgccaccacgctcgactgatttttgtatttatagtagagacggggtttcaccatgttgaccatactggtctcaaactcctgacctcgagtgatctgcctgcctcggcctcccgaagtgctgggattacaggcatgagccaccgccccgacccaaactctagaacatttaaaactctgagccaaactcggtgggttctgatgcagggtcagagctgagaactgatgcatggccagctgtggccgttctcaacctgaagcagttttgccccctggtgacacgtggcaatgttgggaaacatttttggtggataccaccgggcgaggcagttgctggcaactagcgaggaggggccaggaatgccactaagcccctgacggcgcacagccttccacagcaaacagtgatccggcccaaaatgtcggcggtgccgaggtggagaaacacagtctactggcaggtcctggggagacagaacaaattccggggagaccaacaggctctgtttgaattgtgcagctttatgggggtacaacttcagcttcaggcgcggaggctgcaggctgagccacaaccaaccaggggtcctttgagaaaggggtggtgagggctgcgtcgtggaggagcagggctgtcagcaggtgaaggaccaccctgggggaggtggaagcctcttctcagtgcatccgggatgggcatgggtcccctggctgagcaccgggcagggatgcccagagaagaaggcacacccaggaaagtcaggaagcataggtgactccaaaccttctcagagccgaggggacagattaagctcagaataacccgagcttggtcttgctgtttgggggctgcaaaatccaacagccacagaagagagagggtggctggatttagctcttgagtcacttctgcctgcccaggctggtctgttctctgtggtctctccctggatcctgttcagcagacttgaggccgtggtgaacactgagagtctggtggggtgcagaggatgctgggtttagagtggagatgtccagcttccagtcccagcctggcctgggtttagacttgcaaagtagcttccaaagttcctgagctttagttcagttgtccgtgaaatagtgaaaatgctttgttatctttgttatcttttgttttttggttttttttggagacggtgtctcactctgttgcccaggctggagtgcactggcgtgatcttggctcactgcaacctgcctcctggtttcaagcaattatcccgcctcagcctcgcgagtagctgggattacaggcgtgcaccaccacacctggctaatttttgtattttgagtagagatggggtttcaccatgttggccaggctggtctcgaactcctgacctcaagtgatccgcccgcctcagcctcccaaagtgctgagattataggcgtgagccactgcgcctggcctatgccttgttatcttaaaccttgagactcagagtgtggcctgggaccagcagcctgggcactgggcatctcctgggagcttactggaaaggcaggatctcaggccccaccccagatctccgaatcaggatctgtattcttcagggcacgcccaggggattcatggggtcagcttagaagtcaaagtttggaagccgggcatggtggctcacgcctgtaatcccagcactttgggaggccgagggaggcagatcacctgaggtcaggagtttgaaaccagcttggccaaaccccgtctctactaaaaatacaaaaattagctgggtgtggtggtgtgtgcctgtgatcccagctacttgggaggctgaggcaggagaatcacttgaacccgggaggcggaggttatagtgagccaagactgcaccactgcactccagcctggcaacagagcgagactccttctcaaaaaaaaaaaaaaaaaaagtcaaagtttgggaaatgcttagagaccccatgtttttcagagacttgttttgtatgactttatgagatgatcaggcaggtgtggccacaaggggagacagcgaaaggctcaggaagaaaaccagtttattatactcacaggtcctagagacaggaggcacagcatgccacgtagggccatgtcagaggacaccagggtggccaggaggagaagccaaagctgtggtttaggccacagcctttatcgagattttcttgataaaggcaaggtgaagaaaggcgaccagcttaggacttgcagttggaggaattttggtgggtttcaggcttaaggcagaaaaatcttgcctcctggggtgcaggccaggctggtggaggaaggatggctccagaggggttagctggcatatcagagacacacttggggctgcttttttctctagtacttgcctaaccctgaaggcagtgtctccgcagccagaaaggtcttttaagatgtctagacatcgtaatgtacagaaacttcagaaacatttacagtgtagggctgctgactcctttctccccagtgtgtgtagcattgtcttaggaaactacttaaaaagcttttgattcttataacagctttgagaatgagtttattattttttccattttgtcagtgaggaaagtgagcctatgaaagatgaaaaataaaacagaacttctcaaggccacacgactgggaagaggcagaacaaggacttcacccgagtcgtctgtctttttttctgaatggtctgtctagaagtgtgtcaatgttatgatcctctcaaagaaccacctttggtttcattgatctcccttttgctttggttttctagttcattgatttctgcttgggcctttattatttcctttcttctatttattttcagttaactttatcctttttttttttttttttcaaaaaaaattttttttttttgagacggagtttcgctcttgtcccccaggttggagtgcaatggtgtgatctcagctcactgcaacctccgcctcccgggttcaagtgattctcctgcctcagcctcccaagtagctgggattacaggcgtatgccaccatgcctggctaattttttgtatttttagtggagacggggtttcaccatgttggccaggctggtctcgaactcctgaactcaggtgatccacccgcctcagcctcccaaagtgctgggattacaggcgtgagccactgtgcccggccttttttttcagattcttaaggtggaagcctggatctttgatttgagacctttcttcttttctaatatggttgtttaaatgctgtaaatttcactcctagcattactttagctgcatcccacagtttttatatatatgctgttctttaatttttattcggttctaaatactttgtgatttccattttgacttctcctttgacctgtggattatttagaagtggattatatgatttcttctgtgaaccatgggagttatttagtttccaaatagttgggggtttcccaattagtactttgccattgatttctaatttagttccattgtgataagaaaacgtacttagtgatttaaatctgttttcctttattgagagttgtattatggccctgaatatggtctatcttagtgaatattctgtgtgtgcttgagaacatgttttctgccattattgggtggaatgttctgtaaatgtcagttaggtctggttggttatctcaggctactatattcttgctgattttctttctacttgttctgttgattattaaaagaagaatgttgaaataacttcagctataaccatgactttgtctattttcctttcttacttaccagttattgtttcatatattttgaagctctgttttttagtataaaaacatatagaattataattttctcttggaatgatacttttttttctgggcaatattctcttccctgaaatctactttgatactaagagagctactccagctttcattagtgttagcatatcttttcccatctttttacttttttttttttgagacagaatctctctctgttgcccaggctggagtgcaatggcgtgatcttggctcactgcaacctccacctcccaggttcaagcaattgttgtgcctcagcctcccaagtagctggaattacaggcttgcaccaccaagcccagctaatttttgtgtttttagtagcaatgaggtttcaccatgttggccagcctggtctcaaattcttggcctcaagtgatccacctgccttggcctcccaaagtgctgggacaccacacccagcctcctatctttttacttttaacgtatttaattgatttgtgttcttgtgtttaatggtatgttttatgggcagcatatagatgggatttgtttttaatctcataatctctgccttttaattggaatcttatgccatttatatttaatgtgattattggtctgtttgactttagatctaccatgttgctgtttgtttcctgtttgtctcatttgttctttgttcccttttccccctccttctacctctattggattattttttatgattccattttacatcctttattggctgattagctgtaacggctatatttagtttttgtttgtttgtttctaagtgactgctttaaggtttgtggtaaacatctttatcttgctacagtatacattaaacttcaacttcatgtgatataagaaccttataacaggccaggcgcagtggctcacacctataatcctagcactttgggaggctgagggaggcagattgtctgagctcaggagtctaagaccagcctgggcaacatggcgaaaccccatctctaccaaaaatacaaaaaattagccaggcatggtggtgcatgcctgtaatcccagctactggggaggctgaggtgggaggattgcttgaacctggaaggcagagattgcagtgagccaagatccgtcactgaagctgcaaactcctgggctcaagtaattctcctgcctcagcctcctgagtagcttggtctacaggcatgcaccaccacatctggctaattttttaaatttttttatagaaacgggctatgttgctcaggctgatcaaaggttcttggcctcaagtgatgctcctgcctcagccaaccaaagtgctgagattgcagatgtgagccaccattccctgcaggaacagtcttagatttatccacgtagtcactgtttctggtgctcttaattcctttgtacaaatccagatttccatctggtataattttccttctacctgaaggatgttattttttcttctgttgcaggcctgttggtgattaactctttcagcatttttttttttttatttgacaggattcactctgtcactcaggctggaatgcagtggtacaattatagttcactgcagccttgaactcctagacccaagcaatcctcagcctcctgagtggctgggactataggcatgcatcaccacgcctggataattttttatttttactttttgtagagatggtgtcttcctacgttgcccaggctggtctcttactcctgggctcaagggatcctcccactttggcttcccaaatgttgggattacaggtgtgagccactactcctggtcttctttcaactttcgacttttgtatgtctgaaagtctattttgccttcatttttcaaagatagttttgctggttatagaattctagacttttttttttctttcagtactttttaaaaaaaagttatttattattttttttattttgagacagtgtctcgctgtgtcacccaggctggagtgcagtggcacgatcttggctcactgcaatctctgcctcctgggttcaagtgattctcctgtctcagcctcccaggtagatggaattacaggcgcatgctaccacgcccggctaatttttgtacttttagcagagatggggttttgccatgttggccaggctgctttcgaactcctgacctcaggtgatccgccctccttggcctcccaaagtgctaggattacaggcgtgagccactttgcctggcctcaggactttaaagatgctattctgctgtcttctggcccacttcgtttcaagaagtgtgctgtcattctttgttcctctgtatgtaacctttttatccactgcttttaaaatattctttatcactggttttaggcagtttcataatgtggcttgatgtagtgtttttttgtttgtttgttttttgttttctgtgtttatgcttgtgattcattgaacttcttagacatgtgggtttgcagtttcatcaaatttggaaaataaacacccatcttttcgtgaaatctttgtactgtccccctatgcgattccacagactttctttgcagaatcccctgtctgtatttcaggcacctcgaaggtgttcccacagctcacttgggattttcagccttctcctttgtgtgtttcattttggatagtttctgctgctacattttagtcttttttttctgtaatgtctcagctgttgtaattgcaccaagtgcttgttccgtctcagacactgtggttttcatttctagaaatccagtttgaatctttttttttctttttttttttttttaagatggagtttcgctctgttgtccaggctggagtgcaatggcgcggtcttggctcactgtaacctctgcctcccggcttcaagtggttttcctgcctcagcctcccaggtagctgggattataggcatccaccaccatgcccagctaatttttgtatttttagtaaagacagagcttcactgtgttggctgggccagtctcgaattcctgacttcaggtgattcagctgcctcggcctcccaaagtgctgggattacaggcgtgagctaccgtgcccagcctcaatttgaatcttttaaaatgtattttctacatctttacttaacagttgcaatctttcctctgttttttttttaagtatatggaatttggttacagttattcttttaatgtcctattaactaaattacatttggttacagttactcttttaatgtcctgttaattctgtcatctttaactatgttacttttgggtcttttttttattttttatttttattttttgagacagggtctcactgtgtcacccaggctagagtacagtggcatgatcatggttcactatagcctcaacctcccaggctcaagttatcatctcacctcagccccccaagtagctgggactataggcatatgccaccatgctcaactaattttttattttttgtggagacagtgtctcactaatttgctcaggctggcctcaaacttctgggctcaagcagtcctcctgtcttggcttcccaaagtgttgggattacaggcatgggccactgcacccagccatattttcctgcttctttgcatgcctagtaatttttgtttggatggatgctagactttgtgagtttgaggttattgcgtgctggatatttttgtattctataaatcttcttgagctttgttctgggatacagttaagttacttaggacagttcgatccatttaggtcttacttttaagctttgtgagctggaccagagcagtgttcattctagggcaagcctaatttggcccaccacttgattttgtaaataaagttttattggaaaatcactcccattcatttacatggtcaatgtcaggttttatgcaataataacagacttgagtagttgcgccagagactttatggcccacaaagcaaaaagtttttagtatttagccctttacagaaaacatttgccaaccccaggccttgggctaatcttccccactgctgaggtaaaaccctctggagtccctgatgctccatgaattatgagggttttttactctggtgtgaatccttgggattgtcccttgtaaccctctttgtgactcttccccactgtgggtttgggtcattttcgcccagctttgcctcgaccagttctctgctgcacatccgagggcacctctgcagatctctgcagctctgtctccggctgccctctctgctcctgtgaccttgcggtcagctccagctgcaggcctcctcagacttcctcccagcattgccccctgaactcagggaaacccctgggctctgctagggggtcccctccatacacatggggaccatcggggaaaccgtaggcagccggcggggcagtgatagactcacctcccttgtttccctgtggccgtcatggctgctgtcccgcgtcttagtggccatcatgtccactgtcccgcatcttggaggccattgtttctgttgtttgggaaagggggtaaatctggtttcttcctcctttgtgctttgaggtggatgtgccctgggccacctgatttcagagagtctttgccgcggtgcacgatgtccagtcacctggagcttggcagcaggtggcatgtgcacctgtccgcagcctgcagctctgccgtcccacctgcttatgctgccacatagcatttatgtctgtgttgtgtttcccagagtgcagagtgaggactgtggcccggtgggggcgtctcctgcctctgggatgtctgccccagtaacctggaggcagccgcgctaccccacactcgccgggagcagggtctcggacgcacctctccttctctcctagctcgcaacgccctggtggtctccttcgcagccctggttgcgtactccttcgaggtgactggataccagcctttcatcctaacaggggagacagctgaggggctccctccagtccggatcccgcccttctcagtgaccacagccaacgggacgatctccttcaccgagatggtgcaggtgggcggagccgggaggcaggatggcgtggctgaggctgcggtggcccctggcctggctcctaccctgatgtatctgctgggtgccagggggtctgaggtcagttaggacagctgagtcctcaggaacggacatctcagttattaaagaatcccaggttggatgcaaactcagcgagctcagggatgtcacgtttgtgttcaggggcgcttctcctgttttggactccagctgaggatgaatttaccgtgttcctcccagcacctggcgcctcttcagacaaggaggcggatcctgcagctgacaagcacttgctcctgttacctgtggggcggggtgggtccttgctgctttcatgggtcactgctgggtcctaccccttaggaaggtcactcaccatccctctctcctctctcaggacatgggagccgggctggccgtggtgcccctgatgggcctcctggagagcattgcggtggccaaagccttcggtaagacgcctgtcacccacaccccaggtctcccagtgcgccggctgggctaggcctgcctgctttctagcttgcctttatccgttactagttttagaaatttgaattcatatccaagtaatacatgctcatgatagatacatatgtattgtgtatatatgataaaactggatctataatgaggcatgccctcccaccccatggtgtgctggtgagtgttgtaacagcctctgctgtttgtggaaataaaaggttttgcttcgtggcccttgccgatgtccacggtgtaaacgctgctgtctgattttaaggtaacgtcactgaaaggggagtttgcacatggagctgggttgagatctgcatgaacaatcatattctatggtgtctccaccatgtagatacagtgggtgcaaataacctcatcagtagtagccaaatgccaaataaattaggaagtgatgagttttaagtattatctttgggccaggcatggtggcccaggcctgtaatcccaacactttgggaggctgagacgggaggatcacttgagctcaggagtttgaaacccacctaggcaacgtaacgagacctcgtttctattaaaaataaaaattagctgggcatggagcacacctgtggtaccagcttctcagaaggctgaggcaggaggatcacttgagcccgggaggtcgaggtggcattgagctgtgatagtgccactgcactccagcctgggcagcagaacaagatcctgtattatctgtttaattgaaagttttaatttaattggtaataatggctatgtttagtaacaggctcacaaaactcctaaacattgagcaacatgctttattcagctggctcagcccatcggccagcccctcctcgcccccagggaggcagggaacccttcgtctccttcagtgtctgttttgagtcagcatctctagattccctccttgcagctccgtccttcactcgctccactcctgccagctttgtattgtctgtgcggatgacaccttcgttctgtcttgtcaccgtcatttagtccttcttgcgtttgggtttatgttgattctaaaggttacagcccagttaccagtgtatgttactgtgactgtgtaaatcgtgtttactgcctagcccaggctgtgccagggtaaagttccttctccaaagtcccagtgctctaacccttacccccttcaaaggagttttttttgttttttgtttttttttttttttggagacagagtctcactctgtggcccaggctggagtgcagtggcacgatctctgctcactgcaacctccgcttcccaggtttaagcaattctcatgcctcagtctcccaggtagctgggaatacaggcatgcgccaccacgcccaactaatattctatacttttagtagagacagggtctcactatgttggccaggctggtctcaagtgatctgcccacctgggcctcccagtaattttttttttttttttttttgagatagtgtttcactcttgttgcccatgctgggtgcaatggtgtgatcttggctcaccgcaacctccgccccccaggttccagcaattatcctgcctcagcctcccaagtagctgggattacgggtgcgcaccaacatgcctggctaattttgtatttttagtagagatggggtttctccatgttgatcatactggtctcaaactcctgacctcaggtaatccgcccacctcagcctcccaaagtgctgggattacaggtgtgagccaccatgctcagccctccagtaatttctttttttttttttttcgagacggagtctcgctctgtcgcccaggctggagtgcagtggcgtgatctcggctcactgcaagctccgcctcctgggttcacgccattctcctgcctcagcctcccgagtagctgggactacaggcgtccgccaccacgcccagctaattttttgtatttttagtagagacggggtttcaccgtggtctcgatctcctgacctcgtgatctgcctgccttagcctctcaaagtgctgggattacaggcgtgagccactgtgcccggccgtaattttttaattgtagagacaaggtctcactttgtggcccaggctgacctcaaactcctgagttcaagtgatcctcctgcctcggctttcaaaagtgctaggattacaggcctgagccatcgtgcccggccagtttttacatttctgaatggttggaaaaagtccaaataataataatattttgtgacatgtgaaaagtatatgaaatccagatctcatgtttacaaataaagtcagttggagcgtggctgtgccacttggggatgtgctgtccgtggctgctttcgtggcaccacagcagagttgcgtagctgcagcagtgactgcagggcccacaaagcctaaaatatcgacaagttggtcccttacagaaaagctggccctttatagaaaagcttgccaacctcagctgggtgcggtggcacacgcctgtagtcccagcactttgggaggccgaggcgggtggatcacaaggtcaggagatggagaccatcctggctaacacagtgaaaccccgtctctactaaaaatacaaaaaattagccaggcgtggtggcgggcgcctgtagtcccagctcctcgggaggctgaggcaggagaatggcgtgaacccgggaggcggagcttgcagtgagccaagatcgcgccactgtactccagcctgggcgacagagcaagactccgtctcaaaaaaaaaagtttgccaacctctgtcttagatccatgctcctgtgccttcccctaaaaccttcgcctgctcacctctctgagatggcccgtcttagactttccagtcatctcaactggtcataaagaggtttccagtttaaaatgtttttctcggccgggtgcagtggctcacgtctgtaatcccagcactttgggaggccaaggtgggcggatcacctgaggtcaggagttcgacacaagcctgaccaacatggtgaaaccccgtctctactaaaaatgcaaaaattagctgtgcgtggtggcatgcccctgtagtcccagctactcaggaggctaaggcaggagaatctcttgaacccgggaggcagaggttgcggtgagccaagatcactccactgcactccagcctgggtgacagagcaagactccatctaacaaaatgaaaataataaaataaaatggttttcttattataaaaagcattgtaatcccaacacgttgggaggcctaggcaggaggattgcttgagcttaggagtttgaaacccacttaggcaacttaacaagacctcatttctattgaaaataaaattagccgggcatggaccacacctgtggtaccagctgctcaggagcctaaggcaggaggatcacttgagcccaggaggtcaaggtggcattgagctgtgatagtgccactgcactccagcctgggtggcagaacaagatcctgtactatctgtttaattgaaagttttaatttaattggtaataatggctgtgtttattaatatacattcattgtagaaaatgtcaagagtgcagaaacgagtaaagaagagacaaatcacccataatcccttttactaccacaattaactactgcttacatgttttcttgttgttgtttgagacagggtctcactctgtcgcccagactggagtgcggtggcacgatctcatctcactgcagcctcaacctcctaggctcaaaccatcctcccgcctcagcgtcctgaatatctgggactataggcacacaccaccatgcttggctaatttttgtattttttgtagagatgagattttgccatgttgcccaggctggtctcgaactcctgggctcaagcgatcctcctgccttggcctctaaaagtgctgcgattatagctgtgagccaccatacctggcctgattacatggtactgtacctctttccactctgtgatacattcaagcacatgtttacacgcacatatatgtgaatattttagatgtgtattcttagatttacaaaacttattgccgtgtgtagaaattcataatctgtgttacattttgtgaatactttttgagcgatgttgaatattactgaccaggtctttaccgttggttccctttagcatctcagaataattaccgcatcgatgccaaccaggagctgctggccatcggtaagaccccagccgcgggaaggaagacaccagctgtgggcctccagggtcccaggcctgcccctctgtgtctcctgcattgtaggaagaccatgatggtggtgatgaactgggagggcaaaggtggccccagatgggatcttctggaatatttagttttgttttgggtttttgagatggagtctcactctgttgcccaggcaggagtgcagtggcacgatcttggctcactacaacctctgcctcctgggttcaagtgattctcctgcctcagcctcccaagtagctgggattaaaggcatatgccaccatgcatggctaatttttgtgtttttagtagagacagggtttcaccatgttggccaggctggtctcgaactcccgacctcaggtgatctgcctgcctcggcctcccaaagtgctgaggttacaggcatgagctactgcgcctggctcttccagaatattaacaaggactcattcccagacctccacactgctcagtttaacccctaagaacaaggagctgacatctgttgtctgttctaccacttattgagcacctgctgtgtacctgaccctgaggtctgtggccttggtctagatccaggaacacctggaatgtcccacctcggggagggagcacctagtgccgggggtcaagaggggaaggctgtggccgggggaatcgagaggagtcttctgattgtgcccgcaccctgccctgtgcctccctccaggcaggggcaggtggattcatgaagactcgggggccccaagttgcctgcctgtggatgggggtcatgcccgctttcacggtttagttcccttttgttacgtctctgcgggctgacttcttagtggtatatttcgagaccacagtgtgaatctttttgtgtgtgtgagagactgaatcttgctttgtcacccaggctagagtgcagtggtacaatctcggctcactgcaacctctgccttctgggttcatccgattctcctgcctcagcctcccgagtagctgagactacaggcgtgtgccaccacgcctggctactttttgtatttttagtagagacggggtttcaccatattgatcaggctggtctcaaactcctgacctcgtgatccgcctgccttggcctcccaaagtgctgggattacaggcgtgagccaccgcgcctggcccagtgtgaatcttaaattcagttatcataactaaatggtgggtcccaggccttcctgcctttccttctcgcccctcatgagactggtgcaggataacccaggaagcaccatgggcttcttcccaaggggtgtccaccctgacaatttcacgagagccatttggcttcttgacagcaaagtgagtgacccaggttgggtcacaaagggacgttgcccgggcttctctctgagccatggagagcggggcattgtccagttgagtggcggagcttgggcttcctgggaatcacgcactttcaggctgagaaaatccacggcctcctcaaagaccccaccagtaaatcttccaaatgtgatttcccagagcatcccattcccattactttacttattattattattattatttgagacggaatcttcctctgtcgcccaggctggagtgcagtggcacggtctcggctttctgcaacctccgtctcctgggttcaagcgattctcctgcctcagcctcctgagtagctgggattgcaggcacctgcccctgagcctggctgatttttgtatttttagtaggacgaggttttgccatgttggccaggcgggtctcaagctgctgacctctggtgatccgcccgcgttggcctcccaaagtgctaggattacaggcctgagccacagcccctggccctattcccattactttaaaaataccacagatctattctgacagcaccctgagttccagggatacaacacagaccgagcgaaggtcaaggttactatggcagccatgggattccttgatctcagataggccaggtaggcctcagcagccgcacagcaagaagctggctgacgtgagcccatgaaggccaggctgggaggggttgcgctggtcagcttcggctcacagagttgggtccccagcccaagctgctgtagaatgaggatgatcccctgcagcctgtggtcaccttgggcctctaccgagccctcccacgcctgtatttccttgccctagcccatctctctcagggccgtgagctgggccatgtcacccgggatgccctgatactgagttggccccaggccgagccgccttgagagcaggccctgcacctgtgagacctgagaccccactgtgggtcttagcgagcaggagggattctggtcttagtgatgccccaggtgagacagatgctggtgggagcgtgggtcaacctgagcagtgatccccgttcttgggccccagcaatgctgtgggcgtgggctttgtctgttgtaggcagccggcatcacctggggaggcagcatactggccatgaccttggcctcactgtggctgtcatctcgtgagacggaaaggaactgggtggagaacggtgggcagccactgacctcccgagtacctagggtttgtcttacgggcactttatctcagctctcaccccctcctgggtggtgagatgctcccctctgttctgcgtggggaaggcgtgtcctggtcacacaggagaggctgggtgagaagtgtttgaaagctaggatcttgccaggcatggtggctcactcctgtgatcccagcactttgggaggctgaggcggatgggtcacctgaggtcaggcatttgagaccagcctggccagcatggcaaaaccctgtctctactaaaaatagaaaaattaactgggtgtggtggcacatgcctgtagtcccagcactttgggaggtcgaagcgggtggatcactgaggtcaggagtttgagaccagcctggccaacatggcaaaactctgtctgtactaaaaatacagaaattagccaggcgtggtagtgtgtgcctgtaatcccagctactcaggaggctgaggcaggagaatcgcttgaactgggaggcggaggctgcagtgagctgagatcgcgccactgcattccagcctgggcaacaaagccagactctgtctcaaaaaaaaaaaaaaaaaaaaaaaggctaggctttacgtctgcaagaatgtggcctgttttcttccttccctgaaggagtgcgtaggcccaggcccccaggatgattctcccgagccctgccttcctgcctcccttctgggtttttgtccccctccccatctcctttccctccatcctgtgtgccttccctccacgatcagcctgtcttgcctcctccccaggtctcaccaacatgttgggctccctcgtctcctcctacccggtcacaggcagctttggacggtgagtgacctgtccgcctcttctgtttgcccacgttggacgccctaacgttgttacgctgacaaggagtctgcctgccctgaccccggcgccccgtcctccactgtgaacgctccgtggagaggcagggctgggggtcacccactgtcctccagggtgttctctgtttctttattctcatagatcgtcctgcagtttcatactagaaagttccactgggcattgtggtacacccttgttatcccatttactctggaggcggaagcaggagaatcgcttgagcccagcaggatgaggctgcagtgagttgtgaccgcaccgctgcactccagcctgggcaacagagcgagaccctgtctctaaaataaatactagaaagttcccagcacgccaaagccctcctagctcctggtgccagagtcaattcctgaaaggacgtggagataggaagggcctcggctctgtcctgaagcagccgggcatgaagcttagcccagatgccctacggcccctcctcagtcaggacaacaggatggaggtgacctgtggcttaaaggagagaaggaggcgtcacctggcactgcccagtcccccagctggtgacccttgccctgctgggtatgggggccccacctggatgggggcaggagacagagtcggcaggaacctgaaaggacacgtgcttcctgagcttcttcctatagtcagggtggcccaagcgcggctgtctgtgactgcaccctaagtctctttgcctcggtccccttgcagtccccgcctgcttcccaagccgtgctgggagctgacgtcccctcggaagatcagccacaggagtgtggactgaggtctcccttttcccggcccctggtgactgacggtctctgtgttgccttccaggacagccgtgaacgctcagtcgggggtgtgcaccccggcggggggcctggtgacgggtaaggccccccatcttccccttgtgcccgcagccctgagagtgggagaaagggaggagggggcccacagagacgtccctttggctcatgggccgtgcgccccgggactgcacagggacttggggggccacacaggagtagggggaccacaggagactgagcaggggctgggggccttggcagtcgtcgccctacccccacccctgtccccagtgggctctgctgaacaagaggctgctacgctgcgtgctggggggaccctgcactcccgaggtcacctgtgttcccgtgccccgcaggagtgctggtgctgctgtctctggactacctgacctcactgttctactacatccccaagtctgccctggctgccgtcatcatcatggccgtggccccgctgttcgacaccaagatcttcaggacgctctggcgtgttaagagtacgtccttgtcctacaggggagagcgctgtgatgcggtgtctgaacgcggagggtgtcatttatgctaccccattttcctgcagccccctctgtggggctgggactgggaagttagggcagtcccggaacagagaagtggatggccaggagatggccccagagatggtcccgaggctcagtgggaagagctggagctccttgtcctgacacctggggtcttgaggcgagcactgacccgggggagggtcccctcctgatccccctgcccccatccctaccctccttgccacccgcctccagccaccactctgcccggcccagctgggggagggacaggagacgtccctggtgaccagcagggccagcggaacagccttgcaccctggctcagaatggcagttcctttttttttttttattattatttttatttttttttattgatcattcttgggtgtttcttgcagagggggatttggcagggtcataggacaatatggggttgggggtaaggtcacagataacaggatcccaaggcagaggaatttttcttagtgcagaacaaaatgaaaagtctcccatgtctacttctttctacacagacacggcaaccatccgatttctcaatcttttccccacctttcccccctttctattccacaaaaccgccattgtcatcatggcgcgttctcaatgagctgttgggtacacctcccagacggggtggtggccgggcagaggggctcctcacttcccagtaggggcggccgggcagaggcgcccctcacctcccggacgggagcagttcctttaacttaacacattttgttttgtttgtggaagaagcatggagtgggttcacctagcttacttggcattttctggttagccccagcaagttgccaggtgaaaggatggataattttcttgcatgcccgtcgcatgccagggcctttcgcgtgccagtgcgctggggctttagaacagccctgaaacgtgttcatgtgccggcgtggaatgggatggccgctgctgctagaaaccaaggctcagccagggtggggcaggcctgacctatgcgtgcggtggaatcccccacagggctaagcccgtgcactttgtccccagggcaccttctccttggccaggtctcaagggctcacgtggtccctgccccactcctcaggccagctctgtgccctgacaagcccctgctgctgccctccctgaggttggaggccagggaccggccggcaggtctcacctgcgctcagctcagatggggagggcatttctttctttcgacttgaagcatggcctggtcagcagctgctgtccccaagtcctcaggggctgcttggggtccatgagcacctttactcatatgtggggggcagaaagctgtcccgctggtcagcagggccatgttggggcctcgggcagctgccgggcattcctcagctgtgcccttctcctagggctggacctgctgcccctgtgcgtgaccttcctgctgtgcttctgggaggtgcagtacggcatcctggccggggccctggtgtctctgctcatgctcctgcactctgcagccaggcctgagaccaaggtacccctccgtggcctctgagtggggagtgtgctgggggcaggattcctgggcatggtcttatgttttgagggtccggggtgattgtggtcgtgggtgctgctgaaggggaccgctcgctggcaggtgggcagtcaccttgctataaaccatggtgttctcccactgtgtgggggccatgggggtctccccttagcacccctctcccggtcccctgcagcacactaggttgggtgggggcttcccgcttgggacaggccaagcctggtggaggccacccggtcagacccgcctccaggactcactcctccccacaggtgtcagaggggccggttctggtcctgcagccggccagcggcctgtccttccctgccatggaggctctgcgggaggagatcctaagccgggccctggaaggtgcatgggcgggggtcaaggtggtctgaggtcactcccctgtcctctgccccccactccctgctgttcaggaccccaagaccctgtccccaacgctctccagtccacaaggatgcaggcatctctgagtgggctggaccgtcctctgtgggcctcagccagtggctgctgcagcaagggtggtggccccccacatatcactccttccctgcccctaaagtccggttcctgtttctggggggttgattttaggggagctaagggcctgtgagtcctaggagggaaacagctgctgctgtcaccaaacaattgtctctggtcctgccacccgaatcccccaactgggcgactcagccgccacgagatggagcactctggcctctctgtcccctgcccctggccagagcctcctttggcctctgcagagcagctttgggctgctctgggtggcgtgacctggctcgggcctgtctccccagtgtccccgccacgctgcctggtcctggagtgcacccatgtctgcagcatcgactacactgtggtgctgggactcggcgagctcctccaggacttccagaagcagggcgtcgccctggcctttgtgggcctgcaggtgggtgtgcactgggctgccttaggggttagcagctgccggaaggccttcctgtgcctgcctcccatggcgaatgtgacatctctgggctgtgatgctggacggcccttcggccggtgctggctctgcttctgatttaaacagttcttgttcccatctggccttcctcgtccctccctgtggaagggggagcggtggcccccagccctccgaggggtcacgttatggcttctggtcactgccacactgtcctttgtgctggggacacacagtgaacgagggtcagtccctgctctcaggggaattgtattttaggaaacaaaaagagacaggtgaggctaggcgtggtggcacactcctggaatcccagcactttgggaggccaaggcgggcagatcacctgaggtcaggagttcaagaccagcctggccaacatggtgaaaccccgtctctactaaaaatacaaaaaaaaactagtcaggtgtggtggcgagcgcctgtaattccagctacatgggaggctgggagaatcgcttgaacctgggaggtggaggttgcagtaagccgagatcccactactgtactccagcctgggcgacagagtgggactccatctcaaaaacaaacaaacgaaaaaaaacaggtgctcatagaatttcatgaaaaacgtattgtcagggcttccagaggctgaagacgggtttctatggaggccgtcctgttcagagccacaggtaaagtgtaagggctgggtcccaggccctgcgtcttaggcctcacctaggagccttctgagcactgcagggtcaacatcccaggggtgtggccagtgtttgcagagaggcaggggtctctgttgctgtggttaaatgtgcgctctctgccaagtcctagatggcagaacgtgggggactagggcgtgtccccaggcgcccagaggagacattcatgaactagccatggaacaggaggccaagtgacccgtataccccaggtgtggaccacagccgacccttgtcagagtttccttcattcccaacctggcccacgaggctagtgttatcttcatccccatgtccagaagaggtcactgaggcccagagaagccaggtaatctgcccacggtcacacaggatggtgggcccggcttcagatttgggcatgtgccttcagaacttcgctcataagtgttacgtcctgtgtcatatttgcagagcacatgtcttcatggtctttggagatgattcacttaaaaaaatactcctctgacccagacatggtggctcacacctgtaatcccagcactttgagaggccgaggcgggaggtcaagggtttgagaccagcctggccaacatagtgaaactccgtctctactaaaaatacaaaaattagacgggcatggtggcgcacgcctgtaatcccagctgctcagggggctgaggcaggagaatcgcttgaacccgggaggcagaggttgcagtgagccgagatcgcgccattgcactccagcctgggtaacaagagtgaaactccatctcaaaaacaaacaaacaaacaaaaagtcctctgggccaggcgctgtggctcacacctgtaatcccagcactttgggaggccgaggtaggaggatcatttgaggccaggagtttgagaccagcctgggcaacatgacgaaaccccatcaaaaaaataggaaaaaatagctggacgtggtggcgtgcacctgtagctactcaggaggctgaggtgggaggatcacttgagtctgggaggttgaggctgcagtgagccatgatcgtgccactgcactccagcctgagcaatgagcaagaccctgtctcaaaaaacaaaaaattaaaaaaaaaaaaatcttcctctgacagcattcccctggggctgcgtttcttctcaccattcactggtatggaggtgaagccatacctctccgggagactctgagatggcaggtctaccaggctgccgacccgtgtgctacagaggaacatccctgccctggctaaagtctgtctgtctctcaggtccccgttctccgtgtcctgctgtccgctgacctgaaggggttccagtacttctctaccctggaagaagcaggtgggcacagtcagacatcctgtggctttggtgattttgtaaaaatcataaatgcttattgtaaaaaatatgggaaaccagctgggcacagtggctcatgcctgtaatcccagcactttgggaggccgaggcaggtggatcacctgaggtcaggagttcgagaccagcctggccaacatggtaaaacctcatcagtactaaaaatacaaaaattagctgggtgtggtggcatgcacctctagtcccagctattcgggaggctgaagcaggagaatcgcttgaacccaggaggcagaggttgtactgagccgagattgtgccactgcactccagcctgggtgagagagcgagactctgtctcaaaaaaaaaaaaaacaaaaaaaacaggaaaccacctccaccccagtccactttggtgatcactccatacccctcccctaaacacgcatatgtacctgcctgtcaggatgtggatatatgtttgcggttttacgtaaatgggaccatttcatacctggtgctctggaacccacatttttcatgcagaaggttggaaggatgtccttccagccgaaagtccacatcccgggggatcaggacagagcagggccgggtcaggagatccagaagccccgggacagaaggtacgggagggacaggagcagggtgggcgctgacccttgagacagcaatcgcaggaggtctgagccgcagcaggtgtcaacaagaggatgggccagagatgcagagcatccaccccaggccacacagcagtggccagagggtcccaggccccagtgctaggcctcttcctcttccactgaggtcacagctgaagctgggtcagctccgtgagagtgaggggtggcggatgttgtactgacttccttggctcaatgtgacgtcagggagattcacccatgttgttgtagaatcagctcagatgcagtgcactggaggtggataagcagaatgtggcctggccgtgggatgggagggtaccctggagcagtaagaaagggccgttagtcacctgaaaaatacgcttacagagactcaggtgagaccctcatggagttagtgacactggcctgggtggcccacagctccttcctgcacaccttccaggactctggaaggccctccttaatcccttcctgtgaactgacccatcctcacttctgagcttttagtgcttgaaacatttattgtattttctgcagagaagcacctgaggcaggagccagggacccagccctacaacatcagagaagactccattctggaccaaaaggttgccctgctcaaggcataatggggccacccgtgggcatccacagtttgcagggtgttccggaaggttcttgtcactgtgattggatgctggatgccgcctgatagacatgctggcctggctgagaaacccctgagcaggtaacccagggaagagaaggaagccaggcctggaggtccacggcagtgggagtggggctcactggcttcctgtgggatgactggaaaatgacctcgctgctgttccctggcatgaccctctttggaagagtggtttggagagagccttctagaatgacagactgtgcgaggaagcaggggcaggggtttccagcccgggctgtgcgaggcatcctggggctggcagcaccttcccggctcaccagtgccacctgcgggggagggacggggcaggcaggagtctgggaggcgggtccgctcctcttgtctgcggcatctgtgctctccgagagaaaaccaaggtgtgtcaaatgacgtcaagtctctatttaaaaataattttgtgttttctaaatggaaaaagtgatagctttggtgattttgtaaaagtcataaatgcttattgtaaaaaatacaggaaaccacccctcaccctgtccacttgggtgatcattccagacccctccccaaacatgcatatgtacctgtccgtcagtgtgtggatgtatgtttacagttctacataaatgggatcattttatacatggtgctctggaacccacatttttcatgcagtcatttgcagtgaattatttattgtgataataaatagcattagaatacaagatttttaatgtctgcgtggtattttggtctatatatgcatcataattgacttaccgagccctctgttcaacgtgtgcgtgggttagagacgggatcgtgcctcctttagatgtgtcagttgaagcccttgccctctatgtgactgcgtttggaaacagggcttttagggggtaactaggtttaatgaaggtcataaaggtgggccctgaaccgatagctttagtgtcctcgtgagaagagacgccagagagctcgttctctgcaccctcacaccccagggaactccatgagaggacacggcaaaaccaggccatgcgcccaccaggaagaaaggcctcatgaggaccccagcctccaaaactgggagaagatgaatctctgtgctaggccccgcagcctggggtgatctgtgacggcggcctgagcaggtgaggactgcctgcatgtttgtatttttatgaatgctttgattgagtctgggggtaaatccctggaggcctgtggcagcctcagaggtgtgttctccctgcactttcttcaagaagaatgtggcctgccctactgagcctcgttctgcccgttctgcccgggcagtcccggccaatgtcagcgcagcaaggggagggcctctgtaaccagggctgctggctgcggggctccccactggacacgggagtggacattggagtgtccttcatccgcgtcactcttccaggtcccttgcctcctcccattttccttccttcctttccttccttccttcccttcctttccttccttccttcctttctttccttccttccttcctttcctcccttgctcccttccttttctttcttccttccgtttttctttcctttcttccttcctttcatttttttcttcccgttctccctttcttcctccctccacccctttcttctcactgtgttccccaggctggtcttcaactcctgggctcaagcaatcctcttgcctcagcctctggtgtggctgggaccacagacacatgccaccgcgccaggctaatttgttaattgtttttatagagacagggtctcactttgtttcccaggctcgtctcaaactcctgggctcaagtgatactccagcttcagcctgaagtgctggaattaaggtgtgagccaccatgcctggccctctctcattcacaagtgaaccattcacccctgccctccaatccatgtcgtttctgacctcaggcagcttctctttctacataaagtgaacctgtcccaaagctgtgctcactgggcccccctgccagggctggaagaggcagcagttcacatttggcttgcactcacataccaagggcatccatgcttgaacctagacatggttcattcacagggatgggtgaaggtaaacagactgtggcgggcactaggcactatcagtttcataaatctgcataccacctgtgactcagcagttatgcttctcggaatctactcaaacatgcttgagtcagccttccaggaagcaggcacaaggacgtttgtgacaacttggtcagtaattttaagaagtaggaagaaacctgagtttctctgaattcggtaacatcttgactgtaggacacacgaataatgccgtggaatattgtgcagcagttaaaagaaatgaggtgaaggccgggtgtggcagctcacgcctgttatctcagcactttgggaggccgaggctggtggatcacttaaggtcaggagtttgagaccagtctggccaacatggcgaaaccctgtctctactaaaaatacaaaaattagctgacctctgtgacagagtgagactctgcctcaaaaaaaaaaaaaaaaaaaaaaaagagaaatgaggtgaagctttaagttgtaacactgattttggggtgcaataaagcaagttgcagaatgatacccatgttaagatgctatttgagtgaacacacggaccaaacaattctatgttgggtacaaatttaagaaagagttctgggctgggcacggtggctcacaactgtaatcccagcactctgggagggtgagtcggatggatcaggaggtcaggacttctagactagcctggccaatatggtgaaaccccatctctactaaaaatacaaaaattagccaggcgtgttggcgcgtgtctggagtcccagctactcaggagactaaggtaggagaatcacttgaacccgggaggcagaggttgcagtgagctgagatcatgccactgcactctggcctgggcaacagagcgagactcaaaaaataaataaataaataaataaaataaataagagttttctgcactttgggaggcctgtagtcccagctactctggaggctgaggcaagaggatcacttgagcctgggggggtcgaggctgcagtgagtcctgattgtgtcactgaaatccagcctgggcaacagagtgagaccccatctcaaaaaaaaagagaaaaaagaaaatagagttgttgcaaatgtagttagttcaagttaaaatgaggccatgctggagtagggtgggcctaatcctatataagcggtgacttcttgttttttgttttgagacaggctctcactcttgcccaggctggattgcggtggcttgaccagtcggctctctggctccagtgatcctcctgcctcagcctcccaagtagctgggaccacaggcatgagccaccatgcagggcaaatttttattatttattattcatctatttatttatttttgagatagagtctcactctgtggcccaggctggagtgcaatagtgcgatcttggctcactgcaacctccacctcccggactcaagcagttctcctgcctcagcctccagagtagctgggattgcaggcatgcaccatcatgcccggctaatttttgtatttttagtagacatggggtttcaccatgttggccaggctgttctcagactcctgactgcaagtgatctgcccgcctcggcctcccaaagtgttgagattacaggggtgagccactgcgcccagccacatttttaaattttgtgtagagacagggttttgccatgttgcccaggctggaagtggtgtgttgttgttgttgttgttgttgttgttgttgttttgttttgttttgtttgttttgagactgaggcttgctctgtcgcccaggctggagttcagtggcgtgatctcggctcactgcaagctccgcctcccgggttcaggccattctcctgcctcagcctcctgagtagctgggactacaggcgcccgccacctctcccagctaatttggaagtggtgtttttataaagggaaatttggtcatcgatacacatggagcatgtgctgtgaacatgaaggcagggacaagccaaggaactctagcgactgtcagctgaagaacgtcgaggttcaaacgttaataaaggcgaacttgtttctcataaaggtttgcagcctgcaaggaggtttttttaaattttgttttgtttttgagacggagtctcatcctgtagcccaggctggagtgcagtggtatgatctcggctcactgcaagctccacttcccgggtcccggttcaagcagttctcctgcctcagcctctcgagtagctgggattacaggcacatgccaccatgcccagctaattttttttgtgtttttagtagagatgggatttcaccatattggccaggctggtcttgaactcctgaccttgtgatccgcccgctttggcctcccaaagtgctgggattacaggcgtgagccactgagcccggccggaggctcttcttgtagcctgggaagcatggccggcacttggagggagggagggagggagggagggagggaggagtaagacaggaatttactctgaaagggttggccaagtatacatgctcaataggttacaggaggggctaggaatattcatgaaggaatcgcatatgcatgagtattaggcttacatgtatgaaaaatacagcaacatatgacccatgttcactttggggagaaaacttaacagttaaatgcattataatcaggccctatacatgaaaaggtgacatgtagggtacaagtccacgaagtgcacatccccaggaggcccgtcagaaccacagaaacaagaccaggtgccgggtgggcacagttagtggaggcatcctcagcagaaggcccgtcagaaccacagaaacaagaccaggtgccgggtgggcacagttagtggaggcatcctcagcctttgataggacggagtggtgattagtaagagggctggggcggggaagcaggtgggacacggccagcctctgtcctgctgtggctgggacttgaatattttgttgttgttgttgtgttttagccaaaagagggtctgttagtctctgtcaaagagtttcaggacttttaattcagtccacaccagtgatcaccaggagccaggagcgaggcctgggacggatactctttatagcctcggcaggatctaatgctgccaacgccctgatcttgggcttccggcctccagagctgtgagacggtacatttctgcagtttgaagactaaactctgattttttttatcttgcccaaattcctacctaaggcgtctggggagtcatactttacaaaccatacgttctcagtgtcaagcgtgtccgtgtgaagagaccaccaaacaggctttgtgtgagcaataaagctttttaatcacctgggtgcaggcgggctgagtctgaaaagagagtcagtgaagggagataggggtggggccattttataggatttgggtaggtagtggaaaattacagtcaaagggggttgttctctggctggcaggggtgggggatacaaggtgctcagtgggccaggatgagccaggagaaggaatttcacaaggtaatgtcatcagttaaggcagaaacaggccattttcacttcttttatgattcttcagttacttcaggccatctggatgtatacgtgcaggtcacaggggatatgatggcttagcttgggctcagaggcctgacacatggcctgtgacagagccctcaggaggccctgagaacatgtgccaaggaggttgggtgcagcttggtttatacattttaaggaagcgtcagacatcaatcaaatgcatttgagaaatacattgatttggtccagaaaggcaggaaaatttgaagcggtgggggcagggggcttccaggctgtaggtaaatttaaacattttctggtttacaattggttgagtttatctaaagacctgggattaatagtaaggaaatgttcaggttaagatagaacaccgtgctgagcagcactccggcccagcactattacgtgggcaagaggcaaagctccaagggcttagtgtacctgctgcagcagctggtaggggcagactgtgatcacagagacagcactgtcccgcagaaaaatcatgcaagccaccaacgtgagccatgcaagtcatttaaacatttcgactagtcatactgaaaaagtcaaaagaaacagttgaaattaactgtttagagacaaagtctcactctgtcgccagggctggagtgcagtggtgcagtcaagattggtgggaggaaaaagcaggttttaattggagacccagcaaagcgagaagatgcccaactagcgttctaaagtgtcaccttggctgggcgcagtggctcatgcctgtaattccagcactttgggaggccaaggcaggtggatcacctgaggtcaggagtttgagaccaccctggccaacatggagaaaccccgtctctactaaaaatacaaaaattagccaggcttggtggcgggcgcttgtaatcccagctactcgggaggctgaggcatgagaatcacttgaactgggaggtggagtttgcagtgagccaagatcacgccactgcactccagcctggggtatagagtgagactgtctccaaaaaacaaacaaacaataaataaagtgccaccctaaaattaaaaatttatcctcaggttttgtgtgtttgttagtttttgaggcaagatctcactttgtcatccaggctggagtgcagtggtatgatcacgactcactgcagcctggagctccctgggctcaaacgatcctcttgcctcagcctcttcaggtgcaccaccacgcccagctaatttttttaaatgattttttttgtagagatggggtctctctatgttgcccaggctgccatcgagttcttctagggaaacttgccgtgggcaccgtggggagtggggtaagggcagggtctgtgtcttgttcccatggctgtcgtgggcagttgtcggttaggaggggtggctgtcgaggatgttggactaattgttggcgaccccccgccccaagcaggagcattcagctggggttccgcgccgggaattgtttcaggatgagggtcccctctggaatgcgcagaggggcgcagtgtccagagagggacgggatgaaggggtgagaggagaaggaagaaaaagaaagtgggtgattttaaaacggaggtccctggtcacaccatgagcctcacagatgggaaaactgaggcacgggggatggtgcggaccgccgtggcccctccatcatcagtgacagagcgctccgcgcggggccgcggaggtcccttaatctgcaaaggcccccacgcggcgcgctgacgacgtccactgcacccgccgggcgccctctgggccgctcccaggctggccgccggctctgcgcggccgcagacactgtccgaggtgctgggcgccggggcggggggcgcgcctgtcccgccccactcggctgctcgggcctgcccggggtctgggcttccgggagacccgcatgcgccccacgcctggcgggaaccgaggcccctcccgcgtctgtacccggcgcgcagcggcccgaggcgcctcccgggggctgggggcccggagtcactgggaggcgccaccggcggggaattccgcacacgcctgcgcggggccggcggcggcggcgggcagggcggggccggcggcggcggcggcgggcagggcggggccggcggcggcggcggcgggcagggcggggccggcggcggcggcggcgggcagggcggggccggcggcggcggcggcgggcagggcggggccggcggcggcggcggcgggcagggcggggccggcggcggcggcggcgggcagggcggggccggcggcggcggcggcgggcagggcggggccggcggcggcggcggcgggcagggcggggccggcggcggcggcggcgggcagggcggggccggcggcggcggcggcgggcagggcggggcccagggccccgtgacccgaggggcgacagcgcgcggcaggcggcgagctcgggggccgcaggtgcgagcgggcctggagagtctcccggggcggggagcgggctaggatacagtgggccccgcgggccggcgggccgggtcccggggagcggcgcctgcgtccggatgcccctcccggccgcctcttcctgccggctccaagtttcggtttcgccgccggggtgcccggtccagccccgcccgcggcgcccactgaccctgttccccggctgcgggaggggtcggggtgggggcagcgggcacgcctgggaccccggcgacatccccggagcgcagagcgcggaggaggctttgcgccccggcagtgctgcccccgggaagtggccggggcacggggggtgtagtggaaggggacagccggacccgggcctgcaggtccgcccgggaatcctgcgcctgtacgaatggcaacaacggaaaagtgaagttgcaaaaacagactcctaacttttacgagggaggcatcgccccgtctgaaccgcaccgcgcagcgtccttccgacttggcgaagtcgcccgagcgcggggctcaaggccagggtgggcacccctcccggatggctgcctgcaagccggcgggccgggccctgggggagtccagggcgggaggggaaggagctgtgcaaacatggtggtggcccttccctgcccccaccttgttgactttggttgtggttgggggatgggctttgatttgggtggcagtgtctgtgcttgggaaaaaatgtcagagaaaagacaggaagcggattgaatgcaacagtgttgggtgcctggggctctctcttgtgtcttccggcccctagagcagatggaacaataagatgctttagggggccgggcgcagtggctaatgcctgtaatcccaaaactttgggaggccaaggcgggtgggtcacctgaggtcgggagttcgagaccagcctggccaacatgaaaccccgtttctactaaaaacacaaaaaattagccgggtgtggtggcgcatgcctgtaactccacctacttgggagactgaggcgggagaatcgctagagcccgggaggcggaggttgcagtgagctgagattgcccactgtactccagcctgggtgaaactgtcaaacaaacaaaaaatgctttttggaggatttttcgagttttctggtctgtggttccccagtgtagcattggagaaggaaacacttcgggtggaaagaaagaggcctgggcggtggggagtcattgaaggtgtttgagggagggagtgtccactggtggttgtttcaggtagagtgtggaggggaggaggtacggtgggagccagggcttggctgtggcaggggtaggggagttttaaactctccttctactctgaaggagagataattttagtctctggaataaaagggcagcagacctggagaaaagggatgcaaattgtcccatacacctattgggaacctcatcaaagagaagactgcagaagacagatgattgatgtttttatggcattgggacaggggcttggggctggagaggggaggtgtgcagggttgtcttgttgtgcagataatcactcaggtgatctcagagctgctctcagaggaactggcgaggccgcaggcactcctcttgtgtgtccctgggaccgttcctagatccctctaggcagataatggggcctcagagagagcttctgctccattctgctgtttcatggtgtggatttcctttatagccttttacaaaaggatagcttcccagaactcctgagtatgtggttgctctgaatagccatctcaaaattgaccacagaatctgttttggggtggcatagattagtctcccacacaggtcaagccagggaaccccacccagtgcctccgtccctcgttcaggcccagcctgagtgagcccaccccagtgggaggagagggcagggccagggcagggagggggcctgagtgtcctcctggctgctgaaggcaccagtcagctgccgctccagccactgccccagtggagttctttggttccaagccagcagaagaaggtggtgggtgggccagtgtgccctgaggcttcttactggggagggagagagtcaggtcctccactgttaggtggccaagcgcccaaacgccatctccactctcaccctggatgcaagaagtgaccccggaggcctgagtcctggccttggtctggtttgatgccatccaccgcagaggctgttctgagggcaggtggtcagtgcagagtggcgcgctttgtggatggcagcctccccccattactaggaatctgactgccagcccagtagccctgggctgcctgctcaggccccatcacctgtggggcaggtgctttagtccccttaagaggatgaggagggtgaggcatcagcaggctgagcgccttgctcagggcaggccgtgggaccctgccgaacagcacgtggctgccccacgcctgcctggagcatcccctatccccacccagcccaacccatgttctcagcagcagggatggttctaggctggctgaatgagggaccagggcagagactgcaaaagcttgagagccaagggggcagcacagagcggggaggggctgggcttgggctgtgctcctgttgggtttccattaaccaggggaccagctgggctgctgtgatttcactttcgcagaaaatgaaactgaagccgtggtcacgtgacaggacatgtagtatatagcaggctgccagcgactcctgctcttgcttctggatctgcagggcagtcccagcaggacccatggagtgtccttcgtgccagcatgtctccaaggaggaaacccccaagttctgcagccagtgcggagagaggctgcctcctgcagcccccatagcaggtgaggcccaggggtgctggtggaggctggggcagtggggacccctggagatgtctcacctcccttccaggaaatggaaaccctgggcagcaggcagctcaggtggggccgaggtcctctgtggctactgaggctctgtggctctgaatagccatctcaaaagtgaccacagagtctgttttggggtggcatagattagtctcccacacaggtcaagccaggggaccaccacccagtgcttccgtccctcgttcaggcccggcctgagtgagcccacccgagtgggaggagagggcagggccagggcagggagaggacaaaacaagaagttttgtcggggtctttgctggaggttcctgcttttgaaaattttcagtttcatttcctagagagagctcacggtttttcttccccttgggaatgagaagtgtcgggctgagctgagggcttcatagagagtttcagagaatgctgcagggaagcagagtttgaggctctgcaggggttgagagctctgcctgggttagtttttgaggggccgtgagggggccccaggacctgtccaggcacctccctggctcgggaggccagtggagagacaggagcggggcagtgtcaggcgggccttgcctgctgagcatcttgagtccattctcaattttgttggcttctggggcctcagactggttcccctcctcccgggttttaaacaccaaccctaaaactagcagcccccagaccttcagcctttctgtgtccaaagcccagccccacctccactggtgagggcacctcattcttccagctgcttctatcggacccatcaccccggggccctctccttcctccatgacccacatgcagagggccctgctggtctccccgcctccacgctgcatgctgccttcctgcttcctgctcagcacagcagacagtcaaaccacagacccccttacaagatccgcccctgcccccgctgtaactcaggacaagcaggagcccttacggtggccacgaggtcctacatagacggctgcccaccccattcctcttggctccctctcctgtccccagagcccaccaccttctggcccttcctggatacaccaggtgtgcttccaccgcagggcctttgcaccacccttccccagagggcggcctggctccctccttcccctctttcagtctttgcccagctgctcgccatggggtctctccgatgttgtccttcaagggtgtgagccccagtccttccatgtttgtttgtttttttttttttttttagagggagtttttttgttcttgttgctctggctagagagcagtggcgaaatctcagctcactgcaacctctgcctcccgggttcaagtgattcttctgcctcagcctcccaagtagctgggactactggtacccaccaccactcccggctaatttctgtatttttagtagagatggggtttcaccatgttggccaggctggttttgaactcctgacctcaggtgatccacccgcctcggcctcacaaagtgctgggattataggcgtgagccaccgcgcccagcctaagggctccacttctattaataatagtgcggagagcactggtagtgcgcagcatgaactgtttctagaggcatgcaaagcaaatgcacttgagactcctaattcaccacttgtaagaggccaggaatttggtgactctgtacatgatgcttttgaacatttatcgaaaaccaagaaatacagtgatgctggctggttgcccccagcgtcactgagaaagtggtgaaaaggatgaactcagggattcgatgtctgggctgcagctctgcataaatgatctgagagtttcttagtgtgccctggatcagaatcttctctcctgtagccacagggttgaaattgtagaaaatcgagcaccagctctcacgcgattagctgagttaaaatgaaagctgagcttccaggcatgcagggcgtctgctgttaaagtgggggcacttaagccggatgccgtggttcacacctacaaccccagcatgtttgcaggccaaggtgggaggatcacttgagcctaggagtttgagaccagcctgggcaatgtagaaagactccatctctgtattacaagaaaaaaaaagtgaggacattgggtggcaaaggaagggatccttcaagttgggatggggacatgggaagcccatggccaggctggagacattgagttccaaatgatataaagttgagtcaggttgagtttagtagtgtgggcccactagcagagattatgcatttcatgttgcagctggtagagttaggaaggcctctgagtctttgtttggttggctgaaacatggatcaaaaggtggcccaccttactaggcgtggtggttcacgcctgtaatcccagcactttgggaggccgaggtgagtagatcgcttgagcccaggagttcgagagcagcctaagcaacatggtggagccccatctctacaaaaaaaaaaaagaaaaaaaaatacaagaattagctggagcaggaggatcacttgagcctgggaagtcgaggctgcagtaagccatgattgtcccactgcactccagcctgggtgacagagtgagaccctgtcttagaagaaaagaaaaggaaaaaaaaagccttacagtggtctctcagtgctcaaatgaaaagtctcttgcctctcactttattttttaaaattttatttcattgttttgagacagagtcttgctctgtcacccaggctggagtgcagtggtgccatttcagctcactgcaacctttacctcccaggttcaagtgatgttcctgcctcagcctcccaagtagcggggattacaggcgtgaggcaccaccctcagctattttttatatttttagtagagacggcgtttcaccatgttggccaggttggtatcaaactcctgacctcaagtgatgcgcccaccttggcctctcaaagtgctgggattacaggtgtgagccacccaccgcacctggcctcatgtctctcactttaaatcaagagttagacatgattaagcttcttgaggaaggcatgttgaaagctgagataggctgatagctaggcctcttgcaccaaatggttagccaagttgtaaatgcaaaggaaaagtttttgaaagaaattaaaagtgcccccagcactttgggaggctgaggtaggtggatcacctgaggtcaggagtttgagaccagcctggccaacgtggtgaaaccccgtctctactaaaaatgcaaaaattagctgggtgtggtggctcatgcctgtaatcccagcttcttgggaggctgaggcacaagaattgcttgaacccaggagacggaggttgcagtgagctgagattgtgccactgcactccagcctgggtgacaacagcgagactctgtctcaaaaaaaaaaaagaaaaaaaagagaccatcctggccaatatggtgaaaacccatgtctactaaaaatacaaaaattagctaggcatggtggcgtgtacctgtagtcccagctactcgggaggctgaggcaggagagaatcacttgaacccaggaggtggaggttgcagtgagccgagatcacgccactgcactccagcctggcgacagagcgagactccatcccaaaaaagaaaaaaagtgctactccaatgaacacacaaatgattagagagtgaaacagccttattgtgatatggagagagtttgcaatgtctggagaggtcaaaccagtcacaacattcccttaaaccacagccgaatccacagtaaagccctaactctcctgtagccacaattccacacaggctgacagagttgaggaggctgcagagaagatcttgaagctagcagagactggtttatgaggttttaggaaagcagtcatctccataacataaaagtgcaaggtgaagcagcgagtgctgctggagaagctgcagtaagttctccagatctggctaaggttattgatggaggtggctctactcaacagcagattttcttttctttttttttttttgagacagggtcttggtctgtctcccaggctggagtgcagtggctggtcctcagctcactgcaacctccgcctcccaggttcaagcaattctcctgcctcagcctcccaagtagctgggattacaggtgtgtgccaccacttccggctaatattgtattttttattagagatagggtttctccatattagcattgctggtctccaactccttgacctcaagtgatccccctgcctctgcctcccaaagtaccggggctataggcatgaaccattgcacctggccaattttattcttttttaaggccgagtagtgttccattatgtatatgtaccacattttcttcaacgtccattgttggatagttggtggattccatatcttggctattgtgaatcgtgctacagtgagcatgggtgtgcatggcaggattgctggagcccaggaggtcaacgctgcagtgagccgtgatcataccactgcactccagcctgggtcgacagtgagaccctgtctcagaaaaaaaaaaaaaaaaaaaaaaaaaggcagtactgcatccccggagggactgcagggattagtgccaccaccaagcactccaaagatgcaggggtggggattcccattcacctcccctatttggcctttgtggaagacgggtggatcttgggaatgaaaatgaatgatcgtaagcttaatcaaatggtgatttctcagcctccatagtcgtgtgagccaattctcctaatacatcctctctcatccatctgtttgtccatccatccatccatccatccatccgtttatctgtctatctatctgtcatctgtcttctatcaattatccatccatccattcatccatgtacctatccatccatcttatctatctatcctatctatccatctatctataagtctgtattagggttctctaaagggacagaactaataggatctatgtctgtaagaaagggagtgtattatggagaattggctcacacaatcacaaggtgaagtcccatggtaggccgtctgcaagctgggaaagaaagaagccagtagttgctcagtctgagtccaaaagcctcaaaagcagggaagccgacagtgtagccttcagtctgtggctgaagacccgagatccccctggcaaaccactggcgtaagtccaagtttccaaaggccaaagaacctgaagtgtgatgtccaagggcaagaggaacgtgaggaagcatccagcataggaggaagatgaaagccagaagactcagcgagccagcttaccccaccttctgcctgctttgttctagccacgctggcagctgactggatgctgcccacccacatagagggtgggtcttcctctcccaggccattgactcaaatgtcagtctcctctgacaacaccctcacagacacaaccagaacaatactttaccaactacctaggcatccttcaacccaatcaaattgacacctgatattaaccatcacaccgtctatccatccctctaccctatctgtccacctaccctatctatctatccacctatccatctgtcctatcatctatccatccatccatccattcatctattctatctatccatccatctattcatccatccattcatctattctatctatccatccatccattcatctattctatctatccatccatcctctttctattcatccattcatctatccatctattctatctgtccatccatctatactatctatccgtccatcctatctgtttatctatcatctgtctatccattcatctagcttatctatctattcatccatcaatctatccatccatccattcatctgttctatctatgtatctatcttatgtatctatccattcatctatcccatcttatctatccatcccatcttatctatccatccgtccatccatccatgtatctacctatctacctgtctacctacctacctacatattctatagttctgctctctggataaccctgttctatactgtgagtatttaatgagttaacatgtacattgtttaggaagtgctagttaagtatgtctcttatttctgaatccagctacttacttttatgacaataaaaatgtaaatgctggttggcaaatgacccacatgttacaggaggacataaaatagcacgaagtttcctcaccctgggccaggactgtcacattccccagagcaacactgtaaactggtgtgtcctcttctagacatctcctctgcgtgaatgtgtgcgcacacacacacacgttaatgtgagtggcagctcgtgccctgcgcatgccttgctactttcatgtacagtggctgaggcctctagtggaggacggacctcagcagcctccctggctctgccacccagcagggcctgactcagcaacaggcctatcctgggcacttcccttgtcctgctgttttgccgtgacataggctgctaggctgcatgcttgcacggagaccttgccctctgagccaggctggccgtctggaggacagattcccagccactagcctgctggcttcaggctggcacatttacaatgcaaatctcttcaaatcccctgcacaaagcttctctggccactcactggccgcgtctctgtgctccctgccttctagatttctattcagattctctccagcgttcagaatgatggatcttgtcaatctgtgccggtcgttgggtggaaatggcactgcagggcctccgttctgatttccttcatcagtaggcatggcaggcatctctttggaagttaagagaccacatgtatgtgtatttccttgagcggcctgtctgtctttagggaagctcgttttgctttggttggtccttatgattgttgggactgtttatactgggaacagcctgaaacccagctctcctaggcttgctcagcaagagaaacgtgctgggtcaccgttgcccaagtccaggcttgaggggttcaagtgtactagggctttgctccatttctctgatcctgacagctctgcccttctccactgccagctttgtctgcaggtggaggagaacagacagtggtttcccagcaccacctcatggtctttccaggatgcactgagtggcagaaaccccagtaagggtccagaagtatggatgcttccatacttcttgctggttggcccttcccttagtcaatcactagtgccagggtaaatatcggccctgattggattaggctagtcagggcccgcccctggtgggagggtaggttggtgggagggtaggttggtgggaggggcaggctcagaatccctggttgtaggtgaaacagcagctctcgaaggatggggccttgggtcgcctgttgcagatctttctccagctcttactttctggctgtgatgtttcatgtgtgtcttatgtatgtagacgtttagaggatttgttatcaattttgagtcctgctaaggaacttcacgaattcttgagctcttggctacgccaacactgagtactcaaagggaaaaaggtctgcgtggtccctgccctccagatctcagaggaggagagggcagtgacgaaaccaggtgctggaaacgggcgtggggatgaagtgtccagacaggggcgcagctgggactggcttggggccttggagaagggtctgtggggatcaggcagagggaaggttctgtacagaaaagcaggcttggcctggcaccatctggagtgtgtgtcagggagaggtggggtcgtccagacccaggattgaaaacagggactccttgaagggtgttttcgtccattttctgttgccataagagtacccgagcctgggtaattgaaaaagaaaaggccgggtgtggtggctcaagcctgtaatcccagcactttgggaggccgaggtgggcggatcacgaggtcaggagttcaagaccagcctgaccaacatggtgaaaccccgtctctactaaaaatacaaaaaaaattagctgggtgtggtggcgcatgcctgtaatcccagctactccagaggctgaggcaggagaatcacttgaacccaggaggtggaggttgcagtgagccgagattgcaccactgcactccagcctgggtgacagagcgagactccgtctcaaaaaagaagaaaaaagaaaagaggccgggtggggtggctcacacctgtaatcccagcactttgagagggcaagacgggtggatcatgaggtcaggagttcaagaccatcctggccaagatgctgaaacccctgtctctactaaaaacacaaaaattagccgggtgtggtggcatgcacctgtaatcccagctacttgggaggccgaggcaggagaattgcttgaacctgggaggcagaggttgcagtgagccaagattgtgcctctgcactccagcctgggcgacagagcaagactctgtctcaaaaaaaataataaaataaaataaaaaaagaaaaagaaaaaagaggtttatttagctcacagttctgcagactgagaagttcagggcctggccctgatgtctggtgagggcttttgtgccacatggcagagtaggccgacggggatgctgacagctgtgaaagactaagcctgatgggacatcttgacttcataacaacccacctggcgggtgctaatccattcccgaggggagtaaacaagcctctcaagagtaaacccatgaccgcaaacggcaccaagccattcgtgagggatttgccctcacgacccacagacctccccgcagccctgcctcccagcactggcatactggggatcaacatgagttttggtggggatggacaaagtgcgtccacaccacaatgaaggctagagtgagtgtggggctggcagagtgggtgctccatgctgtctgcatggcagctctgcatgggtgagaatctggaggcagagcagctgggcgggcagatgccttagtgccaggacaagggaagcagtttgagacccctgggccgccactgggagaatgcccaccctggggaagacaggaggaatgtctacagtaggggaggaaagcgtaacaggctctgttttagaggtgcccgaggtgcgctgacatcctagtacagagtcaggtgaatccactcgtggacattgggaggaagaggctggatgctaggacggcacagtctttctgtctgattcaccccttgttgtgctgaaactggggtccctggttccctcctacccacctggagcagaacccctaccctgctcatgttagcaggcccaatgcaggacctcggagggagaacagggtgaatctctccatgcactcgtggggaggatttctgtttttccttcctaacactcgcttctctctgagatctgacccttccttcatctgccgttacagattctgagaacaataactccacaatggcgtcggcctcggagggtgaaatggagtgtgggcaggagctgaaggaggaagggggcccgtgcttgttcccgggctcagacagttggcaagaaaaccccgaggagccctgttccaaagcctcctggaccgtccaagaagtgagtgcactgcctcggctcccctccgcccccgctcactctgcccaggaaaatctcactgcacagctgcccagctagcccccgaaaatgccaccatggcccagcccattgaacctgcccacagggcagcagcagagctgccccttctgcacctgattcatctctggctggagtctgtgggttccagaccccctggggcctccaccgtctttttttttttttttttttttttgagacagagtttcgctcttgttgcccaggctggagtgcagtggtgcgatctcggctcgctgcagcctccacctcctggtttcaagcaattctcctgcctcagcctcccaagtagctgggactacaggcatgcaccaccacgaccagctaatttttttgtatttagtagagacggggtttcaccatgttggtcaggttggtctcaaactcctgacctcaggagatccacccacctcggcctcccaaagtgctgggattacaggtgtgagccaccgcgcccggcctccaccttccttttctttctaccagacccaatactcgtgtgtctcccagaagctgtggctggggtggggcctgagcttctgccgtgtgtatctgtgtcccaagcttctgtgggtctctttgcattgagggtgcaagctcagaggtgccttgctgcttcggggcagggacctgagcgtccgctgggtgcgtgtcttgcgcttctgtaggcctctgcattgagggtgcgtgcccagaggggctttgaagctttgggtgtggggtgggtgctctggaaatgtgctggctggcaggttacccttcttggaagggtatggctgagccaccttttggctccctctggccttgaacagcctcttaggcgttagacaccaagagaatgcgtccttgttaagattcccagttggagcactaggcgaggctttcgaggggagcgtcctggacatgttcaaggagaatggttggaagagaagggctcctgggctctagcgcggcctgggaagacccagagggcagtgtcagctcccgggtttcttgctgggcacggagaaggggaagctgtctttctgtgtctgcactggggctggctttctgtctgtcgttccttgtaggtggcactccatggttgggctatggtgggaagtgatgcagccgcagtgctgtggtctgtggggggtgagtggggtgagtgtggggggtgagtggggtgtctgtggggggtgtggggtgagtgtgtggggtgagtggggtgagtgtggggggtgagtggggtgtctggggggggtgagtggggtgagtgtggggggtgagtggggtgtctgtggggggtgagtggggtgagtgtggggtgtgagtggggtgtctgtgggggatgagtggggtgagtggggggtgaggggggtgtctgtggggggtgagtggggggtgagtggggtgtgtgttggggggtgtgtgagtggtgtgaatgggatgtgtgtgtgttgggggtgtgtgagtggggtgtgagtggggtgtgtgtgttgggtgtgtgagtggggggtgtgtgtgttggggtgtgtgtgttggatgtgtgtgtatgtgttggggtatgtgagttggtgtgtgagtggggtgtgtgtgtgttgggggtgtgtgttggtgtgtgagttgggggtgtgtgagtggggtgtgttgggtgtgtgtgtgttgggtgtgtgcgtgttgggtgtgtgtgagtggtgtgtgtgtgttgggagtgtgtgtggggtgagtgggatgtgtgtgtatgttggggtgtgtgggagtggggtgtgtgtgtgcttgtgtcattcccttggagaataatcccttccagagcagccaaggccacccccaagcctggagcacatgggatgcggaaggtttgggtaactccctttttatgcctaatttggaactctgtcagagtgggaaagtggcagtacggatggtgttccttgaaaacattgaaggcaaatgaataaaccctttgccatctggggcaaacaataaacccgcccaaagacagaggaaaagctaagaattgagttacttgggggaataaaattttgaaaagtttccatgaataatgaggaatctagaaagccacacaaatgctcgagcaggacgcactcgaaaaagacctgagaagacctcagtgcaggctggaaggaaggctgagtgtgggaggagtgtcccaactcagggccagtctacagagactgagagagtattattttttctttattttattttatttttttttgagatggagtctcactcctttgcccaggctggagtgcagtggcgccatctcagctcaactgcaacctttgcctcccaggttcaagtgattgtcctacttcagcctccggagtagctgggactacaggcacccgccaccacgcctggctaattttttgtatttttggtagagacggggtttcaccatgttggccaggatggtctcgatctcctgaccttgtgatccacccgcctcggcctcccagaatgttgggattacaggcgtgagccaccatgcctggccagtttttttttttcttttttcttttccatgttttggctgtaggtgtttaaggaaatctctatcaaactactaattggcaacaagccaaaggaacatagactttatttatttatttatttatttattttttgttttatttatttatttatttatttttgagatggagtttcgctcctgttgccaagctagggtgcaatggcgtgaccttggctcacagcaacctccacctcccgggttcaagcgattctcctgcctcagcctcccagctagctgggattacaggcatgcaccaccatgtctggctaattttgtatttttagtagagacggggtttctccatgttggtcaggctggtcttgaactcctgacttcaggtgctctgcccacctcagcctcccaaagtgctgggattacgggcgtgagccaccacgcctgccctattttttatttattttttaatgttttaaatttttttactagtggaaatctgcttgaatttgtaaaatgtagagttgacacagaagatgtgaaaagaatgaagacattttctagggaatcttgaacaagagaaaaccgacatgaacaagagaacaataaaagaggccaggcgcggtggctcactgggtgactgtgagatccttcctcaaagagagagagagagaaggaaggaaggaaagacaataggaaatgttgatgaggatgtggagaaattggaagtgttgtacagtgttggtggaaatgttaaacgctgcagccgttaaggaagcagcaaggcagttgatccaaaagttacgcataaaattatcctaggccgggcgcggtggctcacacctgtcatcccagcactttgggaggctgaggtgggtggatcacgaggtcaggagattgtgaacatcctggccaacatggtgaaaccccgtctctactaaaaatacaaaaaaaaaaattagctgggcgtggtggcgtatgcctgtaatcccagctacttgggcggctgaggcaggagaatcacttgaacccgggagggggaggtttcagtgagccgagatcgcaccactgcactccagcctggcaacagagcgagactcactctcaaaacaaagcaaacaaaccaaaaaaaaaacaaaaaaagaatacgatatggatctgtgctgtagcctggatggaccccaaaaacatgctaaatgaaagaagccagatacaagaggccatgtatgattcctttgatatgaaatatccacgatagactcacccatggagacagaacacagattagtggttggctgggaggagtggggaggagggagtcattgctgtgggatttctttctgggatgaagaaaatgggaactagggccaggcccggtggcttctcacctgtaatcccagcacattgggaggctgaggcgggtggatcacttgaggtcaggagttcaagaccaacctgaccaacatggggaaaccccgtctctactaaaaatacaaaaagtagccgggtgtggtggtgcttgcctgtaatcccagctactcaggaggttgaggcaggagaattgcttgaacctaggaggcagaggttgcagtgagccgagattgagacaccgcactccagcctgggcgacagtgagactctgtctcaaaaaaaaaaaaaaaaaaaaaagcctaaatatccacatatccacacatgagagaagttcagagtgaatacacaggtgaatgccgatgggttgtctctggtgatgagtttacaggggcttttgcgcattttcccaatcccacagggagcctattgaattctgaagctgagagcagtgtatgcgtgaacggtgctctaagcgcagacgccgcattctaaccatggtgaggagggtgctaggagccaagggaggcggccccagaagctgagacagcgagctgcgtggccagcctcaccctgcagcagagtcaggtggtcagtcctcacctgcagtcatggggtgggtggagagggaaagggcgcacagagaggggcccgcgcctgtcccttggcacagccatcctccacttggcctctcctttggtggccgctggttgctgactaacagggtgtcctttgtgcattcttcctctggagaggctactgggcttggctgctgggttgtacttcctgtggtgagggaagaggagactgccggagccaggggtcatttgggttggaggcatcggcaggccaggaggctgctggtggagcttcctttcctcagcttcctgctgggcgtcttgctgtgaggtctcccggcgatgcccggtgtggtgtggaagggaggtgtcggatgagcatgcccgctacagggccagactgcccgcctccgcctctaggggcttgggaggcctggcctggctggccctggggtgcccgggcctgcctataccttctgggtcggtctctgcagtgcatctgtgctctgagcacaagccaaggcattcgtgtggaggcccggggcgccgggagcctggtagggtgctgggagcttggcagggtgccgtgagcctggcagggtgccgcctctggtgtgggcagttctcctcttacgtggacttgtcctgcacgtctgcaggagctgcttcttcgtcttcccacaccctcctgcccatgggccctggaggcagacggtgctgggaagctggtcagtgcccacatgtgggtgtccctgcctgggccttcccaagaggaggtggcccctgaggtggggtctttgcgagtctactggagctgtgcgtggggtgcacagccctgccctgtctgaagggggtcgtgtttcaacagggagctacatcagaggttttggtagatgctgctgtagacctcatatccgatgaatgggaagctgctaatgccatacccagcaagagaaggaagcaggatgcagccccgcttgaggccgccagcgtgccttctgcagactgtgagcaggtagtccgagtcaatagtttgggcagaatgctccctgccctggtgcatgctggcacagcctggcacggccacctcgcacttccggcccttgagtccctgccagtcgaggaaggctgcccaggatgggcgttttcgggtcacccttgggctgtgaaagagcaacgctgattcaggcttggctcttgtgactctgaggatgttttgctagtggtgaatttcagctttattgtgcttgcccttctggcccacatccttccacttgcctttttactccgtgcagctgtccccttggacacctggagaaacttaacctggctgcactcacctggctaaagctccaccagcaacacaggcttcaccacagagagcagcaggggagcccaagggggcttagagggccaggcccaggcaggtgggggcccgacccagcctctgcctgaacacaaggtcttggatggcgctcgccacgtgggggtgtagtggaagccctgctcagtttagtctctggtttttggaagttgaaatcctgactttttctctttttcttttctttctttctttcttttttttttgagacagagtctcgctctgtcgcccaagctggagtgcagtggcacgatctcagttcactgcaacctccgcgtgcagggttcaagcgattctcctgcctcaccctcctgagtagctgggattacaggcacctgccaccacgcccggctactttttttgtgtatttttagtagagacggggtttcaccatgttggccaggctggtctcgaactcctggcctcaaatgatccacccatcttggccttccaaaatgctgggattacagacgtgagccactgtgcctgccccaaatcctgactttttctatagcatttaggagtattacaggactcactaataatatcaaaaatgaaattaggtaacacatgtaatgaaaggacttttgcttttggggaaaagcaagggagcttcataccttgaagagtgatgcttgtgaagtttattacttttttgcagagggcgacggcctccctgccttccccgcaccgcgctccccccagcccctgcccatcgagatggtcatgtgttcattgaacggagacttaccgagcatccaccacgcctaggtcttaagtgtaggcagaagccttcaaggcaggcatgctctttcctctgtgggctggggcttggccgtgagcccactcctgcagctcctgggaaatgcaggcagcgtccacacggggctggacttagccagacctaaggcacagtgtgggtggagagctcattcacaatagcaacaaaaatgtgagaaggaacttgtaaaataaaggatggattcataggccatgcgaggagaagaaggctcgggctcagcagacagtgaagtccgtggagaggtgggcccttccccagagagaacatggaaggtttagcactgcagagatgtctgctgtcacccagaatgacacgggaacttaaccaactaattaatgtataacagtagtatagctctgaatgggtttggtgggttttgtttttgtttgttttgaggcagggtctcgccctgggtcccaggctggagcgcagtggcaaaatcatagctcactgcagccttgacttcctgggctcaagcaatcctcgtgcctcagcctcccgagtagctgggactacaggcgtgcaccaccacacccaattaatttttaaaatttttggtagagatggggtcttgctgtgttacccacgctggtctcaaactcctgggctcaagcaattctcccgccccagcctcccaaagtgcagggattacaggcataaaccaccaccctagcctcgttttgtatttttggaagttgacagattttaaactataaattggtgaggatacttaacagatgtgaggaggagaaatggatgggagatttatagtaaagctgtcaacgtacacgggtggaaacattcccacggagtaacagaggcgcgacctggggatgcgcacggagcatgagatgtgagctggagttagggcactgcatatgcggaccggagcgtgttggtcagggtgtatacacgggtgtggaaagtggggtgtctagaccatgggctcagcatttgggtaaaacacacacactccactcaccccagtcacacacaccccccgccacacataccccactcacacataccccactcacaccactcacacacacccccacaccccactcacaccactcacacacacccccacacataccctccacacacacataccccactcacaccactcacacacacccccacacacaccccactcacacacacctcaacacacataccccactcacaccactcacactcccccccacacacataccctccacacacacataccccactcacaccactcacacacgcccccacacacacaccccactcacacacacctcaacacacacacacaccccactcacaccacttacacacccccaagacaaacaccccattcacaccactcacacaccctgcaacatacaccccactcacaacactcacacaccccccaacatacatacaccccactcacacacacaccccaacacacacatgccccactcataccactcacacaccccccaagacaaacgccccactcacaccactcacacactgccaacacacacagccaactcacaccactcacacacacccccaacacacactccccactcaccccactcacacacaccccaacatacgcaagtcccactcacacccatctcatactcacactgaaacacacagtggtcccttgttgcccacagggggtcggttccaggaccgcggaggacgccaaaatccaaggatgcccagtcccagatatgaaacggcgtggcattggtacataacccacagcatccgcctgtacacttaattttttattttttttattttttgagacggattctctctcttttgcccaggctggagtgcaatggcgtgatctcggctccctgcaacctccgcctcctgggttcaagcgagtcccctgcctcagcctcccgagcagctgggactataggcgcctgccaccacacctggctaatttttgtatttttagtagagatggggttttgccatgttggctaggctggtttcaagctcctgacctcaaggaatccgcctgccttgacctcccaaagtattgggataacaggcctgagccactgaggccggcccccgacaccatgcactttaattcatctctagattccttaccacaggcatctgtatgacatagatgctgtatgaacagttgctacacggtgcggtgttgctctttgtgttctttgttattgttgtctcgttattttctgttttcttccccagtattttctgtctgtggttggctgaatctgtggctgcagagggccgactgtataccagcttgattcaatattttatttttattttttatttattattgttattattttttgagatggagtctcactctgtcgcccaggccggagtgcagtggcacaatctcggctcactgcaagctccgcctcccaggttcacgccattctcctgcctcagcctcccgagtagctgggactacaggcgcccaccaccacgcccagccaatttttttgtatttttgtagagatggggtttcaccgtgttagccaggatggtctggatctcctgaccttgtgatccacccgcctcggtctcccaaagtgctgggattacaggcgtgagccactgcacccggcctattattactatttttcaaggcagagtgttgctctgtctcccaggctggagtgcagtggtgcaatcttggctcactgcaacctctgcctcctaggttcaagtgatttctcctgcctcagcctctagagtagctgggattacaggtgtgtgccaccacgcctggctaatttttgtatttttagtagagatggggtttccccatgttggccaggctggtctcgaactcctgacctcaggtgatccgcccgcctcgttctctcaaagtgctgggattacaggtgtgagccaccacgcctggcctgattcaatattttaatgtaaaacagcatcctaaaagctctagaaaatgtagggggatatttataaaattatgtaaatacttctaagcctcaccccccgtaaaattataaataccgctatggttatgtagttcgagattctgggtcaaagaagactatgaaactgttcaatggaaaagcagacagcaggaggcactggcagcacagggcgcctaccagggcactcggccagtcctcaccgagaagtaagtggtccctaactcagggccaggtggcagttcacacgggaagagctgagggggtgagcctggggctgctgctccgaggtgtcagccctgcaggtgtgatgatgtcagatggttggttttgtttctattgaaaagaggttctgggatggcggcttgagggcagtggtcttccaggaactggatcacggtccctccaagggtctctcctgcagttgcgtctgcgcttactgcagtctttccacagccccgtgttgtgggcagagggagtgaggccaggcctggctcctgcctccagcctccccgggctctgcccaacctccgtgtgctgctgctgctgtttcttcctggctggccactcccctcctgcaaggcaggccctggggaggggtgctggcagctgttcctaaggtctgagccctttgctacatcaaggaaagaagcggtagggggcctgcatcttccatgctggtgggaggtggggggtggtcaggggcctgcctcagtgggctcctcctgttccgggctgtgactcggcggtccagagcctcaggattctccgtctatttctgccagagcctgattatgtcatcgaagctgctagagcatccatgaccttggcttattttcaactttcataattagggaaaaacttaatttgaggtttgattattttaaccattagaaatctttgggtaatggccaggcacagtggctcacacctgtaatcacagcactttgggaggccgaggtgggtggatcacctgaggtcaggagttcaagactagctggccaacatggtgaaaccccatctgtactaaaaatatgaaaattacggccgggcacagtagctcacgcctggaatcccagcactttgggaggccgaggcgggtggatcacctgaggtcagttcaagaccagcctggccaacatggtgaaaccccatctgtacaaaaatacaaaaaaaaaaaaattagccgggcatgatggcaggtgcctgtaatcccagctacttgggaggctgaggcaggataatcacctgagctggggaggcggaggttgcaatgggctcagatcatgccattgcactccagcctgggcaacaagagtgaaacttcgtctcaaaaaaaacaaaaacaaaaacaaaacaaaaatagctgggcgtggtggcatgtgcctgtaatcccagctactcaggaggctgaggcaggagaatggcatgaacccgggaaacagaggttgcagtgagctgagattgtgccactgcactccagcctgggtgacagagtgagactccatctcaaaaaaagaaaaaaaaaaaagcctttgaattgcaaataatggaaagcccagctccacctttctaatcccattgaggaagtttattatggacacacctgatgagccccgagcctgtaggtgaggcttggtgcaggcgtctccggccctgtctactctgccttccggacggctcccccactgagcctctcatcagctgtttcccgttactccctcgtgccacacagtggcttcccctgtgatccacctgctactctgtccttcaggggacaagacagcgcctcctctggtgattgattcctctggagagaggaagcgcttcctcaaatctcattggctctgattggctcacaggccaatcccccagtgggtccctatggccaggatgatagacatcagtggttgacaccagcccacgcacaagagctgcccttggggctagagtaaggctgatgttactcaaaccatgcagccgataacagggagagccaagggaccattccccaggatgggccatccagcgctgtcaccaggtggccacaaacacctgctgtgtgtggacagtgaccatgaccacagcatcactgatgggggccttgcgtgtaccaggcagtgtcctacaactctccgtgtgctttgtcccatttggtcaccctcagtgatgctctgatgtggacacatctgctgtctccactttaaagatggggaaactgaggcccacggtggctcagtgacccacctggggttgcccagccattgtagcatggggtgagctggatgggaactcaggcaggccctctaaacccagcccagacgccactgcatggcagccccggaggtaccaggcagctggccgggcagggacggcgtcatcgcctctccgaggggaggctgtcttcagggctgggaccccacctgccaggtctcctcagcacactgaggacgatgggtgcctgcagtgaagggttgtgcagcacctgcctgtttcttgacggcctcttgcttccccctctcagcaggtcccccggcagctgaccagcctgtcattcagaggctgatacctgctgatgacgccactctacagtgctgggccccagccccagactcttcttctgcagctgcttctgcagttgcttttttttttttgtgagatggagtcttgctctattgctcaggctggagtgcagttgcgtaatatcggctgaccgcagcctctgcctcccgggttcaagcaattctcctgcttcagcctcccaagtagctgggattgcaggtgcctgccaccacgcccagctaattttttgtgtttttagtagagatggggaggatctcaccatgttggccaggctggtggcgaactcctgacctccagtgatccgcctgcctcggcctcccaaagtgctaggattacaggcctgagccaccgcacctgacctattgttttatttttgagatggagtctcactctgtcgcccaggctggagtgcagtggccagatctcagtgaggccctgttttagagtcagcctgcgctgggagtgagtctcctctgtccacacccaaacgcaccaagtgtgccatttcagcagtggtgcttgctccctggaatgggaccaggtgctctcagcggtgtggtgggttggtggcctggggttggtgtcggacgcaggccggtgttggacgcaggccgagcgggaggctggagccaagctgtggcctggggagatgttatgggtcggagggtcggggggtgggggcgcctcctgtgctttgtgtacactgagcatgggtttcctctgaatttaaaaaggaggagaaaatcggaatttctggccctggttctggcaggaagtgtggccatgtgtgatagagaaggggttgcagtgtcggcctggcctcctggaagccctgggatgcagccctgtccagctgcggcctcgtcatgccctgggtgggtgggaacgcagcctcctccttgggccacacaggggccgaccgtcagccgaggggctcctgaagtggcagtgatgggatcctgtggcgcttcctcatccccttgttaccagttgctgaggagagggtggattagcccctgggctgcacctcagtgtgtgcaggtcttcccaggtatgtgggtgcaggaggtggggggcgtggagtgggcacaggttcacacctgctgcctggcagtttggggccctcatcacacaccaccaggtttcaggggatctacaagtcactttcctgtactgacctgatccacacgcacccctgagtactgccccctgggagatgcctgtggggtcccagggtcctggcagcctcctcccaccagccgcagtcctggttccaaaatggggaccgtacacctgaacctggatgtgcctttgagcctggctgtgcctgctgagggtgcggtgggagctgctactcattttttagtctcatccttctcatttcaaattttatgtacgaaatatttttatagaggtgcataaaacgtggaaagcctgtgtgtgctttctaatgttcaaaaccaggccaggcacggtggctcacgcgtgtaatcccacactttgggaggccaagatgggaggattgcctgagcctaggtgttggagaccagcctgagcaacatgggagactctgcctctacagagcattttttaaaaccagctgggaatggtggttcgcgcctgtaatcccaggaccttgggaggccgagatgggcagattgcctgagcctgagatttcaaaaccagcttgggcaacatggtgaaaccccgtttctacaaaaaacaaaccaacaaaaaattagctgggcgtagtgatgctcacctatagtctcagctactcaagaggttgatgggggaggatcacttgagcccaggaggtcaaggctacagtgagctgggtttgcaccctgcactccatcctgggcgacagagggagaccttgtctcaaataaataaataaatacaaatccatctcagtggatgtccaataagcagtgagcccgtgtgagggtctcagcccggccgtgaccgtgccgagtgtggcgagcgcttcaaggccacttgccccgaccctgcccaccccccacttttgtttcttaatttcattctttccaggaaattgcagatttaacagatgttaggtactttggtcgagccaagcttgatgtagttgaggaacggaagagaaagttggagggaaacacgggctagagtagagtaaatctaagaaataaagtgagtgtctctctttctgtttagagcaaaaagaagaaaaggaagaagaaaaagaaggggaacaagtccgcttcctcagagctggcttccttgcccctttctcctgccagcccctgtcacctgactttgctttcaaacccgtggcctcaggacacagccctgccccacagccaagcccagcagagtggccccactggccagccgagccagcccccaggcacagccaccacgccactggagggtgacggcctctccgcgcccaccgaggttggcgacagccccctgcaggcccaggctttgggagaggcaggagtggccacaggaagtgaggctcagagcagcccgcaattccaggaccacacggaaggggaggaccaggacgcttccatcccctctgggggcagaggcctgtcccaggaggggaccggtccccccacctctgctggtgaaggccattctaggactgaagatgctgcccaggagctcctgttgcctgagtcaaaaggaggcagctctgagcccgggacagaactgcagaccaccgagcaacaggcaggggcctcagcctctatggtgagtcatccgggagagatggcctgggagtggcactgagccctcggcacctgggctctgctgcaaggtgctggcgttgcttccctgccggggggaggggcgtcctctgggccctgctccctgggtgggagtcggagggctgcccctccactggggatgccagcccaccctgtccctcggcttgtggcagatgctgccccttaaaccattgagtcggagtcaccctggcccattttgtcaccttggctctggtgtttggggtctttcaggcagttgatgctgtagctgagccagccaatgcagttaaaggggccgggaaggaaatgaaagagaagacccagagaatgaaacagccaccagcaaccactcctcctttcaaaacacactgccaggtgcgtctccttcctgcctgccggctccaggaggccctctcctgcccacggctgcgcctctttcatttaattattcagcaaatatttaagtgctggggatatagccatgattcagacaaagctctggccttcggggtgctcacattccagcggagagagagtcaggaaaccgacttcagcggtgagaagagcgtggagggagggagagagggcacccaggtgggccccgaggtaccatggcacccacagcccgagtggccgggcgaggcctctcttaggaggtggtgagggatggtccccggaggtgtctgggaaggtcatgtgcagaggccctggggcagtgtggggtgggcctgttcccagagcggcagggacgccagtgcccccaggaggagttgggggaggagaggccaccaatgaggctggagagaggcgcctctggaggctgtgattagtggccccagcggcactggaaggtcccgagcggggaagggtcgtgaacattctggccgctgtaagaagcatcccctgtaggggtcaatgtggaggctgggccaggcgcggtagctcacacctataatcccagcactttgggaagcccaggcgggtgcatcacctgagttcaggagttcaagaccagcctggccaacatggtgaaaccccgtctctactaaaaatacaaaaattagccagccgtggtggcatgtgcctgtaatcccagctactcgggaggctgtcgcaggagaattgcttgagcctgggaggcggaggttgcagtgagctgagatcgcagtactgcactccagccttggtaataagagcgagactctgtctcagaaaaaaaaaaaaaaaagaaaatgtggaggccggccttcaaggtcagggtttggttccttgttccaggaagctgagaccaagaccaaggacgagatggctgctgctgaagaaaaagtcggtaagaatgaacaaggggagcctgaagacctcaagaagccagaggggaagaacagaagtgcagctgctgtgaaaaacgagaaggagcaaaaaaaccaggaagcagatgtccaggaagtgaaggcaaggtagggatgcccccgcaggggagcaaaggagaccctgcctgagagcccggcacaccctctccctgcacaactctcaggggatatccaggctgcccttctagtcagctgttttggcaagtttaactttgggggaaaaggggaccacttaggaggtggaggggggtgggcacctgtgccagtttcttgtttcctaatagcccctggggtcctggagccagcgtgggcctttgggaactcaggagaggggctgttctggcccagacacctgctggtgcctcccgccactgtccccagcacttcagaggtgggcagggagtggccacctcttcttcctccattttggaggcagtgaagagagacctccatggggggtggtgtgtcacacgtggacgtgcttgcatgtttgctagggtgtgataatgtgcattacgaacacaaggaccatgtgcctgtgtgtgtgcatgtgggtgtgtgcgtgtgcgttcacgtgtgtgtgcgcacgtgtgtgcgtgtgcatgtatgtgtgcgtgtgtgagtgcgtgcacgtgtgtgcgtgtacgtgtgcttgtgtgtgtgcgtgtgtgcgagtgtgcgcgtgtgtgcatgtgtgtgtgcgagtgcatgtgtgtgtgcacgtgtgtgtgcgcacgtgtgtgtgtgcgcgtgtgtgcatgcacatggcaggtggacagatctcacgggaatcagatttctgttttggttttccaccagcacgctgagcccgggtggaggagtcaccgtgttcttccacgccatcatctctcttcatttcccattcaatcctgacctccataaagtcttcatcagaggaggagaagaatttggggagtcaaaatgggacagcaatatctgtgagctgcactacaccaggtgagcgtgtctgtaggcttgggaggaatccctcagggaaggcataggatgcccagcctgtgacacgtagtttaaaaaaattttgttttttttttttctgagacggagtcttgctgtgtcacccaggctggagtgtggtggcaccatctcagctcactgcagcctccgcctcctgggttcaagcgattctcatgcctcagctcccaagtagctgggactacaggtgtgtaccaccacgcctggctaatttttgtatttttagtagagacggagtttctactaaatgctggctaggctagtctcaaactcctgacctcaggtgatccgcccgcctaggcctcccaaagtgctgggattacaggcatgagccactgcgcccagcctttaaataatttttatccagtgagttgatgacattcttcgggttctggaagatgaatatttcagacagctcttcctggccatgcattttggtgtcatattccatcatggacctttttctttttaaaagtattctttctttctttcttataatttttttttttttttttagagaggggatcttgctctgttgcctaggctggagtgcaatcatgactcactgcagcctcaatctcctgggccatcatgcccagctttgtttatctgagacagagtcttgctctgtcacccaggctggagtgcagtggtgggatcacaggtcaatgcagccttgacctcctggactcaagaagtcctcccgcctcagcctcccatggtgttgggatttcaggcatgggccactgaacccagccttgccacatcaacttatagctttgcactccatgctacgtttgagaataactaaaatttccggggtaggaattttggatagccaaccgtatcctgttcattcacagagacttgggtcatgaccgcgttcttgttgaaggcattgtctgcatttccaagaagcacctagataaatacattccttacaagtacgtcatttataatggggaatcttttgagtatgagttcatttacaagcaccagcagaagaagggcgagtacgtcaaccgctgtctgttcataaaatcttcacttctgggctcaggaggtaagtcgtggcagcaggctgtctgctcacccctccggagtgcaggtgccaatcccgcggtactggacgcgtctctctggagagcacagactttgcctgggcagtgaggtcctctttgctctgcattgaccccgccccagcctccaggttcagtgacactgactctgggttgtgtctctggttggttaaagatgtgttggcttctcctttgagctcagtgtgacttacctactcacttgcaggaggaaacatgcaaaggactttttgtttgtttgttttctgagacagagtctgtcgctcaggctggagtacagtggtgcgatctcggctcactgcaacctccgcctcccagggtcaagcagttctcctgtctcagcctcccgagtagctgggattacaggagcctgtcaccacccccagctaacttttgtatttttagagagacagggtttcaccatgttggaccttgacctcaggtgatctgccctcctcgacctcccgaagtgttgggattacaggtgtaagccactatgcccagccagaaaggatttttaattaagggaaaggagagaaaacgaagccagaagaagggctgcggctgggaacagaggggcagcaaaggcctgggagctgggtcagggacaagtgcagtgaccaggaggccactgggacttgtcccttctctagagattttcagatggttgactggagatgacatccagagccccgtctgcaggctcctgctggctgtcatcctcagcacatcagcccctctgcccatctgtcaatagacgcgggcgcttcccttctcgcagagccctctgcgccccttcatgcctctctcgggggtcccccacctgggttctctgtctgcaaacttgacagacagagatcaagacttgactgtgttgatcacctggactcccagtgccgcctcctcacctggggggtcctgggcttcccctcgctccccctccctgcacagtgaccctgaaactcaaggaagtgagctggggtcaactggttgttgctttcccttggcaaccagggcctccctgccccctggtgtccggtgtcttggaaacagttgttttactgtttatgttgttcatgtgttgttttaggcagatacagaagaatgtaaatttagtccctgtcactccaccttggacaaagacagaagtcctaagaactttatagagtatatattttttcgtttttgtaaacatatatatatattttttttctgagacaggatctcgctctgtcacccaagctggagtgcagtggcacgatctcggctcactacagcctcaaccaccagggctcagctgatcctccccctcagcccccccaagtagctgggcctacaggcgtgtgtcaccatgtctggcaaatttttcatatattttttttggagagactggtcttgctgtgttgcccagtctggtctcgaactcctgggctcaagcaatccgcccatcttggcctcccaaagtgctgggattaagacgtgagccactgtgcccagccaaacatgatttttactagctagagagtgtactctgagaacataagctttgaaagaataggcattagtccggtaattccatatataaatacatttaaatatggaattctatatatataaatatggaattcctgctctgataaatgccatggcattgatggctcggttaaaagggcacgtggtggctgggcgtggtggctcacgcctgtaatcccagcattttgggaggccgaggcgggcggatcacgaggtcaggagatcaagaccatcctggctaacacggtgaaaccccgtctctactaaaaatacaaaaaaattggccgggcgtcttggcagcgggcgcctgtagtcccagctactcgggaggctgaggcaggagaatggcgtgaacccgggaggcggagcttgcagtgagccaagatcgtgccactgcactccagcctgggcgacagagggagactcagtctaaaaaaaaaaaaacatgtgataggggatttgacctggaggtcggcagaagcttccacaaggaggtgatgaccgagttgagaactaaacagttgcaggccctgctgggcccagggtgcagagctggggtgggcgggcctgccagtctagacaactgtgggtcgaaagcatggcagggggctgaggaggcctgtccgggcgcttcccatttctgcctgatttttacttctgtttgtaggtcttcacgtggcctctgaccctgtcattgacatcttgggttttctaattattttacagtcaacctcactgggttttctgcaatgaggtctgcactcatatcgtttgcaatggagcctaagaacagtcacgaattcagcccttgccctgtgtcagccaccatgccaagggccatctgtgccagctgggcagcctgcaccttcctccaggggctgtgtcccgttcctagtacagaggaaaccaactcagtgattgaccaggacagtgctcacttgctagtggggggatgcggtttctgtatgacacattccacctccttgtgatgatgtttaaggaagttgttgatcaagtttgctgagctacatagttagagatccgttgcaagtctcaggcccgctgcatcccatgaccctgggctttccactcattactgtgggacgtctaggatgtctgtttgcacggggctggcctcagatgagaagtcagttggaggagtctggctgtcgtcagtgtgtgggtttttgcttttcccttcctcccttcctctgccccatttactccatatctgtaccagtcgtgatcagccttctaggctagtgtctaggtctccagggttttgatggtcttaggtaggctcttgttccttctgtccctcttagactggcatcagtactatgacatagtttatatgaagcctcatgggagactccagaaagtcatgaaccacatcacagacgggccgaggaaggacctggtgaaggggaagcagattgccgctgcgctcatgctggacagcaccttcagcatcctgcagacctgggacaccatcaacctgaacagcttcttcacccagttcgagcagttttgctttgtcctgcaacagcctatgatttatgaaggacaggcacagctgtggaccgatttgcagtacagggagaaagaggtatcaggcttgccaccagctgctctacctgctgggcaggagccacacctgacctgctagtggccggatgaccccttgactctgtgggccaggttgcaaatgggaatgtgtagaactttccagccttttctcctaccactgtctcttgggatttctctgccctcccccattttcctccttttactggttgtaatctcagccccaccccagcaccagtcctgagtcctcccctggccttggagggagagtggaaggaacggggcaccctctgtcactgcacctttacccacactgcggtgcagcctgggtgggtttcaggccggcctggagctgtttctgagctgaagctgagccctgatgagcctcaggggccctgcctgagccctcatgccagggtcttggctgcactgcagctcctcctgtggctctcacaggtgtggtggtggggcacggatggggtctgctgccctagctgtggtgctggggcagctctggacactgccggtgaattcaagtccatggttcatgcatcttcctcttctcccaccatcaggtgaagagatacctgtggcaacatctgaaaaaacacgtggtaccattgccggacggaaaaagcacggactttttgcctgtggactgcccagtgaggagtaaactgaaaacaggcctgattgtcctttttgtagtggaaaaaattgagcttttattagaaggcagcctggactggttgtgtcacctcctaacctcagatgccagctcaccagatgagtttcaccgtgacctaagccacatccttgggatacctcagaggtattattattttttgtcaaaatgttttttatagctattataatgattttctctgattgcaaaaataagtgcttgactagagtgactgaaagcacacaggcaagaaataaaaccacccgtgattttaccactcactgtggtcatgtcagtagtttttcctagcatctgtcttatttttattatattctgtcctctgttgaattccctgccttttgttttccccccagacggcgtctcactctgtggcccaggctggagtacagtggcgcaatcttggctcactgcagcctccacctcccaggtttaggcaattctcctgcttcagcctccttagtagcagggactacaggtgcacactaccacacatggctaatttttgtatttttagtagagaagggttttcaccattttggccaggctggtttcgaactcctgacctcaagtgatccacccacctcggcctcccaaagtgctaggattgtaggcgtgagccaccgtgctgggtctgaataccctgctttttgaagcttcgtgtggtatcatgagcagcctctgtgtgcgcgtgtttaggaggttgtggcgtgacgccagcctgaactcatcccctcaaggacatctgcagaagcagcgtgaatgttctccccatgcccctgcctgtgccgtgtctagttcaggaaacacagtgtgactgtcctgggcctgaaatgttcagtggtgagaaggcgatggcctttgacttggtacctgctcagaccccactgagctctgcactctctctgcgtgtgttgatttgaacgtgagaatgacattaggtagcctttcctgaccagcatgtcttatcacgacatctgcctctcagttttacacatttatttatttgttgttttgagacagtgtcttactctgttcccccagtctggagtgcagtggagcaatcagctcactgcagcttcagcctcacagactcaggtggttctcccacctcagcctcctgagtagctgggactgcagatacacaccaccacttccagctaatttttgtatttattgtagagacggggtttcaccatgttgccacggtggtcttgagctcctgaccttgtgatccgcctgcctcgacctcccaaagtgctgggattatagacatgagccactgtgcctggcctggttttacaaataaaaaacaaccaaataaacgccgcacattttgacaaagaggaggagtggaggcaaaggcaatgtacagagttagtgccggggcttaaagtatgaggaatcattaatatcttttgactgtaggagattcaccatgtattgtttataggctcaacccttacgtttaaaaagttgttttggggccgggcacggtggctcacgcctgtaatcccagcactttgggaggtcgaggcaggcggatcacaaggtcaggagttcgagaccagcctgaccaacatggtgaaacactgtctctactaaaaatacaaaatttagccgggcgtggtggtgcatgcctgtaatcccagctactcaggaggctgaggcaggagaatcacgtgaacccaggaggcggaggttgcagtgagccgagattgtgccactgcactccagcctgggcgacacagtgagacttcatctcaaaaaaaaaaaaaagttgttttggccgggcattatggctcacacctgtaatcccagtgctttgggaggctgaggcaggagggattgcttgagccaggagttcaggatcagtctgggaaacaaaaattaaaataaaaaatagagccggccaacacagtgaaaccctgtctctacaaaaaatacaaaaaactagccaggcatggtggcgggcacctgtagtcccagctactcgggaggctgaggcaggagaatggcgtgaacccgagaggcagagcttgcagtgagccaagatcgtgccactgcgctccagcctgggcaacagagtgagactccgtctcaaaaaaaaaaaaaaaaaaatgtagctagctgggtgtggtggtgcacctgtaattccagcactggagaggctgaggcaggaggatcccttgagcccaagagttcgaggttataatgatcgcaccaccgcgctgccttgatgacagagtgagactctgtctctaaacaatgaaaataaattttacaagttgctttatatttagatttactgttgccagatggcctgggttcaaaccccagctctgtcagtcaggaccctgcgttgactacttagccaggacccctgcttctgagatccctcccctgtcctgggagtttgttgtggggattcggtgagggcctgcaaaggagctgacgccctaggctgggggctgagggaagccctgtctcctgcgtgagttaaactctgctcagccacgcgcggtgctcctcttgctctgtgtgcacggtgcttgcttcctgttgggactccagactcccagggagatgactccctggccagctcagctcactgcgggatctttattcccttccagctggcggctgtacctggtgaacctgtgccaaagatgcatggacacaaggacgtacacctggctgggcgccctgcctgtcctgcactgctgtatggagctggccccgcggcacaaggatgcctggagacagcctgaggacacctgggccgctctggagggactctccttctcaccgttccgggaacaaatgctagatacgtaagtcgtagagttgtgcttatctacatgaatctgggaagactgactcctacattgtgcacccggagtcccggtgggctctgcagtgactccattcctgattctaatgacagaactaacacacgctcttttaacattttaagacatcaaaactgtcaagaataggctgtgcacagtggctcacgcctgtaatcccagcactttgggaggctgagacgggtggatcacctgaggtcaggagttcgagaccagcctggccaacatggtgaaaacccgtctgtacgaaaaataccaaaaaaaaaaaaaaaaaattagccaggtgtggtggcatgtgcttgtaatcccagctactctggaggctgaggtaggagaatcactagaacccgggaggtggaggttgcagtgagctgggatcatgctactgcactgtagcttgggcgacagagcgagactctgtctaaaacaaacaaacaaaaaactatcaagaatacagaaacaacttgtaacctcagaggcagccgttgttagcacggtggcatacctatttgtggttttgtccaaatatggattcgtgggtgttttatgtacttaaaagaacaacaacaaatgatgtgttatttattctggtttacaacctgatttttcctcttaacagtattttgtgaaccattttttccatcagcaaattcttgtctatgtcttagcgttccagccagagagagtgccagccttgtattgagccagttctctgttacaggacatttggttggttgtgcagtttcgttttttcagcgtgctttcataagcatccttagctttctctgtcccataacttcattgagatagattcctacaagtggaactgctaggtcaaaggcattgtgaactctaaaccatttatacctttgcataatgctggcttaaaggagaggaatattggcaatatatataatcctgatctctgattcaaatataatgacctctcctttatcacaagaaaatattaccagagaaagtttatttatttatttatttatttatttatttatttttaacttctaagttcaggagtacatgtgcaggtttgttatatagataaacttgtgttatggagtttttttgtacagattatttcatcatccaaatattaagcctagtacccattagctatttttcctgatcctctccctcttcccatcctccaccctctgataagccccagtgtgtgttgttcccctctatgtgtccctgtgttctcatcatttagctcccacttacaagtgagaacctgcggtatttggttctcgttcctgagttaatttgctaaggataatggcctccagctccatctatgttcctgcaaaggacatgatttcattcttttttatggctgcatagtattccatggtgtgtatgtaccacattttctttatccagtctactgttgatgggcattgagtttgattccatgtctttgctattgtgaattgtgcttcaatgaacatacatgggcatgtttctttataatagaacgatttatattgtttttggtatatacccagtaatgggattgctgcggtgaatggtatttgtggaattgccacactgtcttccgtaatggttgaactaatttacactcccaccaacagtgcataagcattcctttttctccgcaacctcaccagcatctgttatttttttaccttttaatagcagccattctgactggtgttaagatggtatctcactgttttttttttttaagagacagagtctggctctgtcacccaggctggagtgcagtggtgtgatctcagctcactgcagcctctgcctcctcggcacaagcgattctgctgggattggtagtgtgcgccaccacatgtggctaatttttgtctttttagtagagacagggttgcaccatgttggccaggctgttcttcaactcctgacctcaagtgatccacctgcctcggcctcccaaagttctaggattgcaggcatgagccaccacgcctggcctcattgtggtttttgttttgttttgtttgagatggagtttcgctttatcacccaggctggattgcagtggcacaatctcagctcactgtaacctctgcctcccaggttcaagtgattgtcctgcctcagtcttctgggtagctgggaccacaggcaccccaccatgcctggctaatttttgtatttttagtagagatggggtttcaccatgttggccaggctggtctcaaaccccagacctcaagtgatccgcccaccttggcctcccaaagtgctgggattgcatgtgtgagccaccatgcccggcctcattgtgattttgatttgcatttctctaatgatgagtgatgttgagctttttttcatatgcctgttagccacatgtatgtcttcttgtgaaaagtgtctgttcatgtcctttgcccactttttaatgaggttgcttgtttttttttcttgtaaatttgtgtatgttccttatagatgctggatattacacctttgtcagatgcatattttgcaaaaattttctcccattctgtgggtcatctgtttactctgttgatagtttcttttgctgtgcaaaagctcctcagtttaattagttcttatttgtcaatttttgcttttcttgtgattgcttttggtatttttgtcgtgaaatctttgcccattcctatgtctagaatggtattgcctaggtctgggcaaagattggagaaaaattatggagaagtccttaaaagcacaggcgacaaaagtaaagtgagataaatgggattacatcaaatcaaaaagcttctgtgcagcaaaggaaactatcaacagagtgaagagacagtccacggaatgggagaaaatatttgtcatctacacgttggatagggggatttaaggaactcaaacaagtgaacagaaaaactcagatctaaaaatggacaaatgagttgagtagtcatctaaaaagaagacacacaaataaccaacaggcatatgaaaaaatgatcagcatcattaattagggaaatgcaaatcaaaaccacaatgagatatggtcttacccaagttagaatagctgtgatcaaaaagacaaaaaataaatgccagtgaggatgtgggaaagagaaactctcatacagtgtaggaatgtaaattagtactgccactatggaggacagtataaaggttcctgaagaaactaaaaatagaactactgtatgatccagcaatcgtactgctggggatatatccaaagtaaaggaaatcagtatgttgaagagatagctgcactcctatatttatcgtaacactcaatagccataatatggaatcatcctgagtgtccacccgcagatgagtggatgaagaaagtgttgtctatatacacagtagaatactatttggccaccaaaaagaatgaaattctgtctttcgcagcaacatggacaagcttggaggagattacgttaagtgaaataagccaggcgcagaaagagaaatactgcatattcccactcatacgtggatgtgaaaagagttgatcttctagaaggagagagtagaatagtagttacgagaggcgaggaaggatggggagagggctagccaaaggttggctagtggatacaaaagtatggctagataggacgagtaagttctagggtcctagagcagtatggaacgactgtaatttacaatttattacgtttttcaaatagctggaagagtggagtttgaatgtttccaacacaaagaaataaatgtttgagatagatatgctaattaccctgatttgtacacattatacactgtatgcatatatattgtatccatatatttgtacagattacagactgtatactttgtacatagtatacattgtagacatatttatatgtatatacagtgcataaaatgtattctctgtatgcatttgtatacattatgtattgtatacatatatagaaatataacactgttccccataaatatgtacaattattatgtgtcagtttaaaaataataaaagcagctgggcttggtggctcatgcctataatcccagtactttgggaggcccaggcaggaggattgtttgaggccaggagttcaagaccagtctgggcacatagtaaaacccagtttctacaaaaaaacaaacaaaaaaaatagttaggcatggtggggtgtacctgcagtcccagctacttgggaggcttacatgagaggatcgcttgagccagggaggtcaaggctgcagtggtagaagtccagattccctagaagttgaaataaaagcatctttattttcagattcttgacaggtaaccacaaactttctctttaagtataatctctctgaaatactgaatactgggttatttaatagaacagtcataatgaccacagattaacccttctaagcaaaatagattaatttattttggccttgaaatggtctttctcttattaatgtgctagaatgtattcattcattcactggatgaatacttgaagagcaccttccttgtgccaggaagtactactcaaggcacagcgtgtacagcactgctcaaaacagacagctgctcctggccttgtggagcttgcattctagctggagaggcaggcagttaatacatcagtaagtcctattgatgagagagctctggaaattcctccttcccctagcctggaggctcaggccacagaatctgctaaggtctgaaggtagggtaggagaacagaggtaatgactgcagcactctgggccttgcagtgagaacaagacagtgaccatccaattgggaaaggggctggagaactgaaagagacgccccctcataaagcatgatgctcagagcctgccaaatgccaaagactggggacagcagaaaaaatgaggcagttgctctgtgcccctggatcccaacttctgctaaaggcagtgttacggtcttgcctttagaaggcgtaaaagcctttggaaaccaattctattccttttcttttttcttttcttttcttttttttttttttttgagacagtcctgctctgtcgcccaggctggagtacagtggcgcgatctctggtcactgcaaccttcgcctcccaggttcaagtgattcttgtgcctcagcctcccaagtagctgggactacaggtgcatgtcatcacacatcacatgtggctaatttttgtatttttagtggagatgggttttgccatgttggccaggctggtcttgaactcctggcctcaagtgatctgcccgcctcagccttccaaagtgctgggattacaggcgtgagccacccactgtgcctggccagccgttgggaaccaattctaattaaagctacaacaaagctgtagttcatctaaactattaactcagcccctgataacagaagaggccactagatgatcaagagagaaaacagtcaatatagtcagacccatggatggtccatatttacctagaaaggctagatatagtagaaatatagagtaccttttattattattgctatttttatgtacttatctttaaatatcttgaaaagtctgcagtagcattgttcctaaagatccaatcgttcaggtaaaagtggcctttagtatgcagtgaacctttattgatatgtttttcataacttctgttacttctagggagccttgctttatttcttttccattgtcaacattttgggtctccagtactgtgttccagaatcagcattatttaagggccttcgctgagcccacttgggctgtttgatcctggacactcgttaataataattaagaggcttggctgggtgcagtggctcacacctgtaatcccagcactttgggaggccaaggcaggtggatcacaaggtcaggagatcgagacaagcctggctaacacagtgaaaccccatctctactaaaaatacaaaaaatgagccgggcgtggtggcaggcgcctgtagtcacagctactggggaggctgaggcaggagaatggcgtgagcctggtaggcagagcttgcagtgagccgagatcacaccactgcactccagccaaggcaacagagtgagactccaacacaaataaataaataaataaataataataataataattaagaggcttaattattggggtatatcccttttattgtaaaatatacataatctccagtttaccatgttaactccttttcaaggcacagttccctggcaccaagcacattcacactgctgtgtagccgtcagcaccatccacctcccgaactcagcttccccagctgaaactccatccccatgaaacacgacctccacactccccctcctcctggtaaccactgttctcctctctgtctctaggattttgacttctctggggacctcacgtgagtggaatcacacaggatttgtccttttgtgtctgatttatttcactgagcataatgtcaagattcatccatctcaatgaattctttttgtgtatttatttatttatttgtagagatggaatcttgctatgttgcccaggttggtctcaaactgctggcctcaagctatccatcctcctgctttggcctcccaagttgtggggattacagacatgagccactgcacccagcagtgaactttttttttttttgagacagttttggtctcattgcctatgctggagtacaatggcacgatcttggctcaccgcaacctctgcctcctgggttcaagtgattctcctgcctcagcctcccaagtagctgggattacaggtgtgcgccaccacgcctggctaatttaggatttttagtagagacgggatttctccatgttggtcaggctggtcttgaactcccaacctcaggtgatctgcctgcctcggcctcccaaagtgctgggattacagacgtgagccactgcgcccggcctgattttattactattttttaatattactgctccttgtagaacagggctaccccataggagcatgcccagaatggccagcagtgaattcttattccgtattctgaattctatattaagttaattctccttttttctttccttttttttttttgagacagagtctcactctgttgcccaggctggagtgcagtggcgtgatctcggctcactgcaatctctgccgccggggctcaagtgattcttctgcctcagcctcctgagtagctgggattacaggattacaggcatgtgccaccatgcctggctgatttttgtatttttagtagagacgcagtttcaccgtgttggccaggctggttgcaaacttctaacctcaactgatccacctgcctcagcctcccaaagtgctgggattcaggcgtgagccaccacgcccggccattaagttaattctcagtaggttgttctgtacttttcatttgattcactgcatatttttgttttccacatagcctttattttattttttaaagtagagacagggcctcactaggttccccaggctggtttcaagctcctgggctcaagtgatcctcccgagtcagcctcccaagtattgggattcaggtgtgagccaccacgcctgccctcaagtagtatttaaatcatttttgaattcgggactgtttctgtccctccagcattggtttcctccattttccctcactgatctcactgcgtctcttttctccgtccctatttctcttatgcaggagttccctacttcagtttatgagagagaagcagcatttgctgagcatagacgagcctctcttccggtcctggtttagtctgctacctctgagtcacctggttatgtatatggaaaacttcattgagcacctgggtcgttttcctgctcatatcctggactgtctttcagggatttactaccggcttccgggacttgagcaagtcttgaatacgcaggtttgtgtctgaagtcggctctggagtcctggcttagcaaaagcagactagataactaaacatggaaagctcaggattcttattcctaaaaaacagacagtgggctgggtgcggtggctcacgcctgaatcccagcactttgggaggccgaggcgggcagatcacgaggtcaggagatcgagaccatcctggctaacacagtgaaaccccgtctctactaaaaatacaaaaaaattagctgggcgtggtggtgggtacctgtagtcccagctactcaggaggctgaggcaggagaatggtgtgaacccgggaggcggagcttgcagtgagccgagatcacgccgctgcactccagcctgggtgacagagcgagactccatctcaaaaaaaaaaaaaaaaagaaggcgtctcatgtgatgcacttcgtagctgccattcttcctttcacattttttggtggagaaaatggtataagtttaaatcctgagttttatctgtaaaagaggtaagattagtatgtgagcaccttaaaatttgtttgtaggaagaaaacaatgtataccatattgatgttggatttttttcagctctgttttagcaatgacagtggcattgtgattcaatcttttgtcctgtttttctttttttctctgccttaggatgttcaggatgttcagaacgttcagaacattttagaaatgctgttgcgactcctggacacttaccgggacaagtaagtggaaagcacgatgcagtctctccctcacatgcggcccccgggggcttcctctgacccctataattggccgtgacccacatgtgctgttgtaacagcaaggtcataaattaatatgtggcccacttctcttctcaggttattaatattgtcgtctgtttttttttttttttttttgagtcagagtcttactctgttgcccaggctggagtgcagtgacgcaatcttagctcactacaacttctatctcctggttcaagtgattctcctgtctcagcctcccgagtagctgggattacaggcgcaccccaccacgcccagctaatttttgtgtgttggtttgtttgtttgtttgtttttttgagatggagtctcactcttgttgcccaagctggagtgcaatggcaccatcttggctcactgcaacctctgcttcccaggttcaagtgattctccttcctcagcctcctgagtagctgggattacaggcgcatgccaccacgcctggctaatttttgtatttttagtagagatggggtttcaccatgttggccaggctggtcttgaacttctgacctcaggtgatccgcctgtctgggcctcccaaagtgctgggattacaggcgtgagccaccatgcctggccgtctgttttttttttttttttttttttaaagggaaataatagatatcagctgctaagatttgggtttatctccccctgatcttttttcctatacatttttcccttacttgtaaatagtcatgatactgcatatgcctggtgggcgttctgcatttttttaatacttagtcagtttaagataaaaatcaaaggtagctttatataattatccaaaatcatttgctcctgcaaatttgtgacctctgataccctgaggggtcagcagacagaatgcagaaccactgaaatgtgccagtgagcgatgggatgggtgttgtctgagctgttctctgagcggctcgggcacttccagtcttcgttcacctcctttgttcacgtctctgccgatgttgatccagcacctgtgacttgaggatcccccccacaagctccctatctccccaccactgtgtgtcacattctcagcccagggagtcctttcttacaccgccttcccagtcccctccatcaactctcctcttaagctcctcctaagtgtcctcttaagtctctcctgagtcccctcctgagtccctcccaaggctcctcctgagtccctcctaagcctccttctgagtccctcctaagcctcctcctaagtcccctcctgagtccctcctaaggctcctcccgagtccctaccgagtccctcctaaggctcctcctaagtccctgctctgtccatgtgtccctcagaaaacacaaaacccaggcccggcagagctggagccaattccacacgggctgcacgctcttctactatttctttctcttcctccctcctttctgtttctttctgaatattttttcaaatttatgtcatattttaatgtctagtaataaacatcccttgccttttttcacatcttggaacgcactgaggagtgtttggacttgctttggttagaacagttgagactacagagacaaaacaagaggactttgcttcctttttatcttagtcacaagttcaggactgactgagattttccagacgttaacctagataaggtcaaacaaatgccctgttggtagttattttgaaggaaggagctagtcatcaatggtaaccattttctggcttctcctaaatccttgccgggatttctcttaactctttgcggggcaggattcccgaggaggccttgtcaccatcctacctgactgtgtgtctgaaactgcatgaagccatctgcagcagcacaaagctacttaagttttacgagctgccagccttatctgccgagattgtctgcagaatgattagacttctatctctggtggtaagtggagtcaacacacaaggtatcacacccgggataggtgcggaatttcaagcagcctcaatttggaaaggaaacagactgattcccgggtgctgggatgagatggagcggtggtttcagcagtggacatttcttgtgcacctgcttgatgctgggttctgttctgggtgtggggggtgtcagtgggccagggtctgcccttctgccaccttgggctttcctgggagggaggcagggagttaatgtgtggccatcagctggtcatggggaaaccagagagctggcgcaggggctgggggtcaggcaacgccacgcggagaagacgacttttcttttttcttgattctgttgtttgcagagaactacggggaccattttcctcccaaaaaatacatgtccaaacatggtctttcccaccttcttgacattgtagcttgaatacagtaacaaaggccatagcgccacacatctgccccccgctgcatgtcgtgtcccaggtctgatggcaggatgacccggctcctccgtcccaaagaaagccactgttgtgacttctcccatggatcagttttttttttgttttttgttttttgttttttaagacggggtctcactctgtcacccaggctggagtgcagtggcgtgatctcggcttactgcaagctccgcctcctgggttcacgccattctcctgtctcaacctcccaagtagctgggactacagacgcctgccaccacgcctggctaatttttgtatttttagtagagatggggtttcaccgtgttagccaggatggtctcgatctcatgacctcatgatccgcctgccttggcctccaaagtgctgggattacaggcttaaaccaccacgcccagcctcccatggatcagttttacctgtcttccagctttgacctttctgcctccgactttccccactcacccccatgtctctgagctctgtctgtgtggtgcagagatcggcaattccttctttcccgtctctgtgcagttttcacccacttgagttcatgagtttcagtttgaaagtgatgtaaggtttaatgtttagactgatcatttgtttgtttttttgagatggagttttgctcttgttgcccaggctggagtgtagtggcgccatctcagctcactgcaatctccgcctcctaggttcaagtgattctcctgcctcagcctcccaagtggctgggactacaggtgtgcaccaccacacccagctaatttttgtatttttagtagagacagggtttcaccatgttggccaagctggtctcaaacgcctgacctcacgtgatccacctgccttggcctcccagagtgctgggattgccgatgtgagccactgcacccagcacaattttttttttttttgagacagagtttcactcttgttgcccaggctgtagtgcaatggcgtgatctcggctcaccacaacctccgcctcctgggttcaagtgattctcctgcctcagcctcccgagtagctgggattacaggcatgtgccactaaacccagctaattctgtatttttagtcgagacaggatttctacatgttggtcaggctggccttgaactcctgacctcaggtgattcgcctgcctcagcctcccaaagtgctaggattacaggcatgagctactgcacccggctgatcattttttttaatcttacttcaagttagaactgtgacgttagtgatagaaaacaattaagtgtatgttttaactttcttcctttcagttttcttgtgttaaagtaccacagacacagtttaagaataaatgtcattggtgagatgatcacgttctctggagtggctgctatttaaaccgccacaggcagctgccaacttccacataaactgtgtttaaggaatttgtcagttacttaggatttattttctacagaaataactatcttaaatgttggctgggatctcagataagtttaatccatattatggacaaaatactctctacctgtgccataaaagcaaacaaacaaacaaaaaacctttgcaatactaaaattaaacaaagcaaaaatacgtgacgcatgttgaagaaacttttaggtgtctgctgctgtgaaggctccagggttgacggacacttggagaacaaggtgcccgtgtcaggctccggaggtctgtgcagcctctgagcggtcattcagtttgttgttattggccatcgctgtccagccctgtgctgctggattgttctagaaggagctgtgccattggggggaccttcagcagtgcctgtttcgttttctgtcggcccccgccccctgcgtgctgtgctctagtcactcctgtgcccagccccctctgcgggctctctttcacagcagcacctgcatcctggtccctcttacatgctttgaaagctcctgcctgtatcttcccgccctggcccttcccaggtatagtgacgctgtgttcccctgcctgctgtgggcttttcctctctcccactctcgggcagccccgcccagcagcagccttgtcctcttgcccagctgcctcgaggcgtgggcctctcggtgcttccagtgagcacctgagcgtatccaggttctgtggctcctgacacttgcacgatgtgcggggctgtgcttaaaaaaaaagatcacacacttggctgggtgtagtagctcacacctgtaatcccagcactttggaaggccaaagcaggcagataaccagaggttaggagttcgagaccagcctggccaacatggtgaaaccctgtctctactaaaaaatacaaaaattagccaggtatggtggcatgcacttgtaatcccagctacttgggaggctgaagcaggaggatcacttgaacccaggaggtggaggttgcagtgagccaagatcgcgccactgtactccagcctgggttacagagtgagactctgtctcaaaaaaaagaaaaaaaagaaaaagaaaagaaaaagaccacacattaatccaggactgtggggctcctcccaggaggaggtggccctgacccctgacctgtatgcttcctgggaaatgtgcttctggggaggacagagggaggaggaaggagagggaggaagaggaaggcaggggagagaagggaggcattacaggaggctttgagcccaggggaagaggggttttccctctggtctggtgggtccggcacggaggcggggggagagcatgatgggagcacagtgggaaggggacccaggtttacctccgggtcaggagcctggctgtggtctggcatggaggcagggggagggcatgatgggagcacagtgggaaggggacccaggtttacctccgggtcaggagcctggctgtggtctggcatggaggcagggggagggcatgatgggagcacagtgggaaggggacccaggtttacctccgggtcaggagcctggctgtctcctgtgtctaaggaacaggcccgggagtctgcagggcccctctctggggcgtgcttttccccctcagtctcctgggcacagcctggggacctgctcattggcaggacagaggctgcctgggctttcgggggagcacacagatgccgttccctccctccctcttttctcccgtatctcccacgttcagggtgaacccagaaaaccctggggaatggaagtgctttgggaatgtgggcttctgccaaggcctgtggtccctccatcgtagccactccttgagcagcctgtgccagcagggaggagaggagggggtgcagcatctcgccgggaacctgagtccacagccgaggatgactgaccctccctcttgtgtgacaacaggattctgcaggacagagagatgaaactggaaataattcagtccaaacagtcttccaagggacccttgctgctacgaaaaggtggctccgagaagtttttacaaagaacatgctcacatcttcaggtgcctcattcacatacgtcaaggaaattgaggtaggcatttggccgaaggcttctgggtagggatgtgactgatcgtgattcctcatggcctcaaatcatggggtacaggctgctggccaggggcagttgttggccttcacctgagcctcagttcttcatctacaaaatggagttgctcctgtctacctggcagggtggctctgaggcagacagatgccgggtgcaaagtgctgctgcactgcctcgtgtcccctggccgggcacagtccctgtggtgatggaggtgtggaggtgatggtgatggttggtggtggtggtggtagaggtgatggtggtggaggtgatggtgatggttggtggtggtggtggtagaggtgatggtggtgaaggtgatggtgatggtggacgtaatggaggtgatggtggtgatggtggtcatggaggtggtggaggtgatggtggtggtggaggtgatggtgattgtggtggaggtgatggtggtgatggtgatggttgtggaggtgatggtggaggtaatggaggtgatggtggtggtgaaggggatggtggtgatggaggtggtggtggtggaggtgacaatggtgatgctggtggtggaggtggtggaggtactggaggtgatggtggtggtgaaggtgatggtggaggtaatggaggtgatggtggtggtggaggtgatggtggaggtactggaggtgatggtggtggtgaaggtgatggtggaggtactggaggtgatggtggtggtggtggtgatggtggaggtggtggaggtaatggaggtgatggtggtggtggaggtgatggtggaggtactggaggtgatggtggtggtgaaggtgatggtggaggtaatggaggtgatggtggtggtggtggtgatggtggaggtggtggaggtaatggaggtgatggtggtggtggaggtgatggtggaggtactggaggtgatggtggtggtgaaggtgatggtggaggtactggaggtgatggtggtggtgtaggtgatggtggaggtgatggtggtggtgaaggtgatggtggaggtaatggaggtgatggtggtggtgaaggtgatggtggaggtactggaggtgatggtggtaaaggtgatggtggaggtactggaggtgatggtggtggacgtgatggtggaggtaatggaggtgatggtggtggtggtggtggtggaggtactggaggtgatggcggtcgtggaggtgatggtggaggtaatggaggtggtggtggtggtggtggtggaggtactggaggtgatggtggaggtaatggaggtgatggtggtgatggtgatggtggaggtactggaggtgatggtggtggtggtggaggtaatggaggtgatggtggtggtgaaggtgatggtggaggtaatggaggtgatggtggtggtggtggtggtggtggaggtaatggaggtgatggtggtggtggtggtggtggtggaggtactggaggtgatggcggtcgtggaggtgatggtggaggtaatggaggtggtggtggtggtggtggtggaggtactggaggtgatggtggaggtaatggaggtgatggtggtgatggtgatggtggaggtactggaggtgatggtggtggtggtggaggtaatggaggtgatggtggtggtgaaggtgatggtggaggtaatggaggtgatggtggtggtggtggtggtggtggaggtaatggaggtgatggtggtggtggaggtgatggtggaggtactggaggtgatggtggtggtgaaggtgttggtggaggtactggaggtgatggtggtcgtgtaggtgatggtggaggtgatggtggtggtgaaggtgatggtggaggtactggaggtgatggtggtggtgaaggtgatggtggaggtaatggaggtgatggtggtggtgaaggtgatggtggaggtaatggaggtgatggtggtaaaggtgatggtggaggtactggaggtgatggtggtaaaggtgatggtggaggtaatggaggtgatggtggtggacgtgatggtggaggtaatggaggtgatggtggtggtggtggtggaggtactggaggtgatggtggtggacgtgatggtggaggtaatggaggtgatggtggtggtggtggtggaggtaatggaggtgatggtggtggtggtgatggtggaggtactagaggtgatggcggtcgtggaggtgatggtggaggtaatggaggtgatggtggtggtggtggtggtactggaggtgatggtggaggtaatggaggtgatggtggtggtggtggtggtactggaggtgatggtggaggtaatggaggtggtggtggtggtggtggtggaggtactggaggtgatggtggaggtactggaggtgatggtggtcgtggaggtgatggtggaggtaatggaggtgatggtggtggtggtggtggtactggaggtgatggtggtccgtggaggtgatggtggtggtggtaatggaggtgatggtggtggtactggaggtgatggtggtggtgaaggtgatggtagaggtaatggaagtgatggtggaggtactggaggtgatggtggtggtggtggaggtgacagtggtgatgctggtggtggtggtggtggtggtggtggtggtggaggtggtggtggtggtggtggtggtgatggtgatggtggtggtggtggtggtggaggtgatggtggaggtaatggaggtgatggtggtggtgaaggtgatggtggtgatggaggtggtggtggtggaggtgacagtggtgatgctggtggtggaggtggtggaggtactggaggtcatggtggtggtggaggtgatagtggtgaaggtgatggaggtggtggaggttatggagataatggtggtggtggaggtgatagatatttgaacatgcctgacctaagaaaagttcattttcatttttggctgggcactatggctgatgcctgtaaccccaactctttaggaagcctaggtggaagggtggcttgaacccaggaggtcagggctgcagtgagctatgactgtgccactgcactccaacccaggtgacggagcgagaccctgtctcttaaaatattttttttacagtgcattttcatgtgtttcaacctcctagtgtccctgccaaaaatattttaatctgaatcaaatcatggggaaattatgagacaaatcaggtcaaaagacagtttacaaaacagttggcctgaacttttcaaaactgtcaacatgttaaaagaaaaaagaaaaaaatgaccagggaactcttctagaaaagagatgtgataagtaaatgcagaaaagagacgtgataagtaagtacagcgtgtgtcccaggaggatctaggatccagtcaggacaggagctggagcacgagaggaacgggggtggagaccacttcctgggggcagagtgtcctcctctccacgttgcacgtcctgagtgggaaacctgcactggagttgcacagggaagggctagggtcttaggagaccctgcccaggtatgtagtggcaaggtgccatgatgcctgcaacttactttccaacggtttgggagagaaaatgctcatttgtgcagagtccgaagagggagcacagaggagagaggaagagtgaaagcagctgtgtgaagcgtgaatcgcacaggactggagttgaatgaatgtgggtggtggtgtgctattcttgcgacctttttgaaagttcaaaaattttcaaagtataacatgagagataagtcctttcagaataaaaagccggttgtgcagtaggaggaccagtagtggcccctggttgggtctctgattctagaaagccaacctgggctgctgtgaccggccactagcatggctgactgttgatgaaggttggggagagccctggtgttcgcggagtcccgcgctctctgtattgccgtaatgctctgtctttctcctttcatgggagtgtgccgtggcatttagtcgtgagagtgggtgtgacctgtgtgcgggttttgcaggtctggaggcggctggtggaaatccaattccccgcggagcatggctggaaggagtcgttgctgggagacatggaatggaggctcacaaaggtaccaaaagtttgggggcagtcttttcagggcgtgaaggcaagctggagaaccccagaccattagcgacagccaagagatctcagcagtgcctctctgtgggcagggatggggtgaatcacagctccgtgtttctgtttctgatccagcccttatagtctgtccctagaagagcgcttcggagtcttactgagaggacagagaagaacaagggcccaggatctcaccatcatgggggtgcgggatttttcctgaccccttcgttggacttgcgacagggatgctgtgtttacttggcccgccgtgctcaaccccttgtgggagggagcacgtgagtgagtgtggcatctggccagctgctttgggagctggcaggagcaagctccgtgcaggccctgcagcagtgcccagattgaggtgcctgcaacccccgaagctccagagggcatgttacagtgctctcttagctccgccgtctatggacagtagtgtgttatcagctcagtgggtcccttgccttgttgcctagggtggctgccctctgccagggccaatgtgacagcctcttttaggtacccacactcggtgggtcccaagctcttgtccagcatccaagaagaatggggtcacccggacacttgaaggatggtgaaggtggagaattttattaagcaatggaaatggctctccatggagaggggagctggagaggggatgggtcaggtggggaatcttcctctggtccaggtgtctggctggctcttccctgaagtcaggacgtctttccgaagttaaaccgtctctccttggaagtccagccatccctctgaagtcaagtcacctgtttccagtgaagctacttctctctcactaccaagtctggggtctttataggcacaagatagggggcagggtgggccctaggtagttttggaaaaagcaacattctattggtaaaaagacattactccgaaagaaccagtggggagagagtaggcacacggggatagaggttctcactttgggccatgggtttcaggcttttcggctcgaaggtggggttttgccagggacccgcccctgtctgcgtaggatttctctgcctcctgcctccatcaatggggccccaggcacaggaggggccaggcctgcccataggcaggaagtctaagtggcctgttggtgacaggaacctcatgacacacaagtggagaacacacagacatgcccctcatgctgaattaaggcctgaggctcaaggaaaattagtttttatgtgatatgagagttttatatgtaactttttttttttttgagacggggtctcgctctatcgcccaggctggagtgcagtggcgggatctcggctcactgcaaactccgcctcccgggttcacgccattctcctgcctcagcctcccgagtagctgggactacaggcgcccgccaccgcgcccagctatatttttgtattttttgtagagacggggtttcaccgtgttagccaggatggtctcgatctcctgacctcgtgatccacccgcctcagcctcccaaagtgctgggatgacaggcgtgagccaccgcgcccggcctatatgtaactgttaaatggatctttaaagggaaaagtcagaaacaaggaaaaatgacctatgtctcataacttacctgtttttgcaagccaggtgctttttctgcagagtgggaaaagagactcttttaaattttagcctttggtctactggtggggggcagggaggacatgctttgcgtgggccaggagaagcttaaaattgggggaaacagtaaaacagcaggaaagtaaaaatgatgaaagaattttcatcccatagagcactggagcgctgcatccgaaagctctgaaaccacccccctttgatttttgcaggaggaacccctctcccagatcactgcctactgcaatagttgctgggacaccaaaggcttagaggacagtgtggccaagaccttcgagaaatgcatcattgaagccgtgagctcagcctgccaggtgaacaatctctcctcctgggaaacggattcgggctcacagctgtgttctgccatgacccagctaagggctatgaagcacccgctgggtctcagctcctccgctaactcagagattgggaagtgggcaccctcctccctcgccaagggcaatggcgctgaaatctagttctctccggattcctcagtgtgctgcacagtccctgctgctcgcaccatcctgcatgtgttccatatggaatcacggccgtgcgcgtgtggcacaagtcacacgggcttgcaggccgttcctcagatggccctgtcatcactgtggctgctggtttgattgattgttaacacttgctcagtaggtgtgcgggaagagactccaaaggttgacagaacatttatggaagcaaaatatgtgaaatggaaaattgtatcaatttatttagctcttttcggcaaaggggaagagattgtgcccccctgtctcccaggaacagtctcgcaggcaatgccacatgaggaagctccctgctggccacggctgccctgctcacatttcctaattggacacttaacccctgtacaagcacagccttgcggccacaggggaagtccagaaacattgaggtcattgaattccggggaccaaggggttctaattttttaagtgactgatacctttgataaggttttcctttccctttttcgttaactctttgttgagatattgttcgtatgccatacggtacatctgtcaaaagttccagttcagcaggttttggggtagtcacagatatgtacagtcatcaccacagttaatgacagagcattttcatcacttcaaagagaaacccggcccctttagccatcatcctcctcccctctagtcacccactcccctctgcaggcataaacaattgctgaacataaacaactgcttctgtggctttctctgttctgactgtcatatgaatggaatcatatcatatgtggccttttgggtatggcttatttcactgagcataatgtttttttgttgttggtggtggtggttgtttgttgtttttgagacagagtttcactctttttgcccaggctggagtgcaatggtgcgatcctggctcaccgcaaccgctgcctcccgggttcaagtgattctcctgcctcagcctcccaagtgctggaattacagctactttttgtttaaagagtcttttaattgtttaaagaacaatgtgccgccacactcggttccttttgtatttttagaagagacagggtttctccatgttggtcaggctggtctcgaactcccgacctcaggtgatccacccaccttggcctcccgaagtgccgagattacaggtgtgagccaccgcgcccggccgagcataatgttttgaaagaccgctcaggctggacacggttgctcacgcctgtaatcacggcactttgggagcccaggagttcaagacaagcctgggtaacagagtaagaccctgtctctataaaaactaaaaaataaacaaaaaaaattagccaggcatggccgggcacacctgtggtcccagctacttgggaggctgaggtgggaggctcccttgggcccagaaggtcaaggcagcagtgagccatgatcacaccactgcacttcaacctgggggacagagcaagaccctgtctcaaaaagcaataacaacaaaagtccatccatattgtagcttgtgtccgtttacgttaagtattccttacccaaaatgcttgagaccagaagtgttttggatttcagatgttttcaaattttggaatatttgcatttacataatgagatgtcttccagatgggacccagagtctaaccacaaaattcacttgtttcatatacatcttatacacatagcctgaaggtaattttatacaatatttttaacaattttgtgcatgagacaaagtttgtattaagtatttgtatgttgaatttttcacttgtggcatcattatactcaaaaagtttggattttgtagtattttggatttggggattaggaatgctcaacctatatttcatttttttccatggccaaatattccccgtttatccatgtgtccattgacggccatctatgttgcttcttcggctattataaatctgctgatacaaacattagtgtacatatttatgtgtgggtgtatgtcttcatttctcctgggtgtatacctcgatgtagaattgctgaatcatatggtaactccatgtttaattgtttaaagaactgtccggccgagtcccacagcagctgaaccattttcaatccctccagcagcataggaggcttccaggttctccacatcctcactaacatgtgttgtctaactttttgattctagccatcctggtgggtatgaagtggtatctccttgtggtttttgtttgttttttgagatggagtcttgccctgtcacccaggctggagtgcagtggcgtgatcttggctcactgcgacacctccacctcctgggttcaagcaattctcctgcctcagtctctcgagtagctgggactacaggcatgtgccaccatgcccagctaatttttgtatttttggtagagacggggttttgccgtgtgggtcatgatggtctcgatctcttgacctcatgatccacatgccttggcctcccaaagtgctgggattacaggcgtgagccactgtgcccggcctcattgtggtttttaactgcatttctctgataactaatgatatcaagcatcttttcatatgcttattggatttgtctgtatcttctttggagaaatgtttattgagatattttgcccctcatcccccccacccccccttttttttttttttttttgagaaaaggtctcgctttgtcacccaggctggaatacaatggcacgatcacagctcactacagcctcaacctcctgggctgaagtggtcctcccactttagcctcccgagtagcagggactacaggcatgtgccaccatgttcagctaattaaaaaaaaaatttctgtgggccgggcatggtggctcatgcctgtagaccatcctggctaacacggtgacaccctgtctctactaaaaatacaaacaattagctgggcatggtggcatgtgcctgtagtcccagctgcttgggaggctgaggccagagaatcacttgaagccatgaggtggaggttgcagtgagctgagattgtgccactgcactccggcctgggcgacagagcgagactctgtctcaaaaaaaaaaattttttttcgtagagacagggtcttgagatgttgcccaggctggtcttgaactcctggactcacatgaacctccctccttggccttccaaagtgttgggattgaaggcatgagccaccgcacctggcctcttttgctcatttttaaattgggttgtctttttattatagagttgggagtctttattctatatacaagtcacttgtcagatatatgattgcaagtattttctcccattctatgtgttgttttttcacattcttattggtttcttttgaagcacagaagtctttaattttgaagaagttagcatatctgttttttcttttgttgcttgtacttttggtgtcaaagaatcctttgccaaatcctaggtgatgaagatttactcctatgtttatttatctctaaatgttttatagttttagctcttacatgtaggcctttgatccattttgagttcctttttatatatggtgtatatggtgtgaggtaagggttctgtttcattctcttgcatgtggacatccagttgtcccagcatttgttgaaaggactctacattccctgttgagtgatgttggcactcttgtcaaaaatctgttgacgatacatgtatggatttatttctagattttcaattctatgtggtgatctacttgcctatccttgtgtcagtaccacactgtttggactaccattgctttctagtaagttttgaaattgggatgtgtgagtcctcctactttgttcttatttttcaagattgttttggctattttgggtcccttgcaatttcataagaattttagaatcagtatgtcagtttccactgacaaggaagtcagctgggattctggtagggctggtattcaatgtatagatcagtttggagagcattgccatcttaacaaggttaagttggatttctttcattcaattagatttttttttttcccctgttagacagagtctcgccctgttgcccaagctggagtgcccaagtagctgggactacaggtgtccaccaccatgcctggctaatttttgtatttttagtagtttcaccatattggtcagggtggtctcgaactcctgacctcagatgatcaacccgccttgacctcccagagtcctgggattacaggcatgagccaccattcctggccaatttcttttaacaatgttttgtatttttcatagtttaaattttgcacttcttttgttaaatttctaagtacttttttttgggggggggtgctattgtaattggaattgttttctgaattctgtttccagattgttccttgctggtgtctagacacacagtgctccatgcgtcttgtatcctgcaacattgctgagctcatttggtagctcaaattgtgtgtgcgtgtgtgtgtgtgtgtgcatgagagagagaattaaattttctatacataagatcatatcatctgtgaatagagtttcacttcttccaatctggatgccttttatttctttctcttgcataactgccctggctagaacctccagtacaatgttgaatgaaagtattgaaagtggacatctttgtcttgttctgatcttaagagaaggtttcagtcttttgccaccaggtgtgatgtcaacgtgagcttttcatagatgccctttatcagtttgtggaagttcctttttgttcctcatttgttgaatgcttttttttctttaatcatagaagagagttggattttgtcaaatgcttttcccgtatctactgaaatgatcatgcgatattttcctaatgttattaactgatatttgatgttaaatcaacctttcatccctgagataaattacacttgatcgtggtgtatagttcctttaacatggggctggataaggttttcttttatccttttaaatgtcagaaagtatctattataaattaaccttgtggtttttactaattactgaaatgttttacagaaactttgaacctaaaggaagaaaaatattgtttctcggaggagaattaaaaagagaattaaaatgtatatgttgtttgtaggcagctttttaaaagaattatggtttaggaacataaaatatatgctatattaagggtttattcatttttggtatttttcatgatatgaaagtccaaaaaaaaatgtagaaactggcagccagaaggaaggagggtgactggttatgttggtgtgtgtttgtgtgtgtgtcttcacatctctggtgctggacacttaaggaggcagtatacaaggaaatgaaaattttcgaagaaatgtaaagtgttttactattttgctctttttgtggccttataaaacaagttacagtagatttcagaaatgctatcgagtaggtaatttgcttttgttatttcaaaacaaactaatgaaaaacttctaaatgtccctcttttattaattttcttgtagtctcagaccagtatccttcaggggttctcttactctgatttgcggaaatttggcatcgtcttgtctgctgtgatcactaagtcctggcctaggaccgcggacaacttcgatgacattttaaagcatctgctcacgttggcagatgtcaagcacgtcttcagattgtgtggtatgtttgcgggagtgctgggaacatcagctcaggcaaggtggtgtcttcctgattgggaaaggtgggaggcagaagatttgacatgatgatactgaattgggatgggctgatgtttgacaaaggctgcagtttggacagagagaccctggaaggctcagagtgtcttgcgttgtaaataataactaatgctaacagccactattcattgaatgcttgctgtaccctagcgactgtgctgggtcgcaagggaagtgcccttgaaacaacccttctgaaagtcccctttaaggcccccagttttcagatcaggaaacaaatggagaaggcaatgcgacttacctaaggtctcaaagattataagtagtaaaaactaaaatccagacccaggtatgtcttatttggagatcaatatagaatgtccaagccaacattgatgacctcaacagaaagtgaagtactgtgctgtctgatttccccccagccccccgcgccccaggtgttttgtggtcaaggagggagagagagagacattccatcctaaaaacgttagagtccagttggcgtgtgagaccttagattcatatctttcagtgagaaggcgctggatgtggaacagccaaaatcaatgctgagcttcctacacatcagggaagctgtggggatcaaataactgaattaatatgggagtgcacaagtaaaagctactctcttgaaaagatcatttttgtgttatttgtatttatttatttatttatttatttatttatttattttggagatggagtctcgctctctcacccaggctggagtgcagtgctgtgatctcagctcactgcaacctctgcctcccgggttcaagcgattctcctgcctcagcctcccaagtagctgggattacagatgtgagccactgtgcccagcagtttatttaattttaaaacaaggtcttctctgttgcgcaagttagcatgtagtagagtgatgccatcatcgctcaccgtaagcgctgacctcccgggctcacgtgatcctcctgcctcagcctcccaagtggctggcactccaggcgtgcaccaccatacccagcctgtttataagttggatagaattttttagagcactttgatgtgtacagaaaaattgagcagaaagtacagagagttgtcatctatctctgccaccatcacacgggcagtaccctgttagtaacatgcagcattagtgtggtgcttttgttacagctgagaagccaatattgataacactgttattaactaaagtccatagttcgttcctggtgttgtccattctctgaggtttggataaaccatggcctgtgtccaccattccagtatcgtgcagaatagttgcgctgcccctacaaaatcccatgctccacccctcccatttcctttagtcttttccagaatgtcctatggttggaatcttataggatgtcgcctttagactggcttccttcacttagtaatacgtatttatgtttcctccatgtcttttcatggcttgagagctaacttcgttttaccactgaataatattctattgtatggatgtgctaccattcgcttacccgttcacctcatgaaagacatcttggttgcttccaagtttttgcaatgattagtaaagctactatgtttgtttcttatggtgcagataagcttcatcttctcctaatattgtatggctctaatattactgggagagaaatcctaagtggttaaacaaaacatgtataaaaattctgccctctaaatttatcataaaatcagttccaagattttgcaagataatgaagttgtacagagtataaagttatcacatggctgtttctctctttgcatatgctatgaaagtgtctccctaagaccatcctgatagacattgctaggtatgtctgcatcctctggtgcagtttcttctgttgtaggtattcctagggcaggggctttttaaagaagattctgtgtattctatttaaaaaatatactcaggccatgtgaggtggttcatgcgtataatcctaatgttttgggaggccaaggcgggaggatctcttgagcccaggagtttgagaccagcctgggcaacaaagtgagaccctgttctctacaaaaaattttgaaagtttgccaggcatggtgctgtgcacctgtgttcctagctactcgggaggctgaggcaggaaaatgaggttacagtgggctatggttgtgccactgcactccagcctgggtgacagagagagaccctgtcaaaaaaaaaaaaaaaaggaagtcagtccatccgtatactgaaggggacgtgggttttaacctgagaaatgtgtctcccagctgattttggccattgcgggaagtcatcttcttggacaaggaagttgttcaggggatgaatctgggcaagacctaaccctcgtgggggaaagcagaagggagtggaatgattggcgcatctggagacactggccagccattgcctgtgtttgaggaagtgggggcagaacaagaggttatctggaattcccacggtaacggcaaagaggcaggaggtggggagcccactgtgttaactgtgttcttcatctattcaggaaccgacgagaaaatactagcaaatgtcacagaggatgccaagaggctgatagctgttgccgactctgtgttgacgaaagttgttggtgacctcctaagtggcacgattttagttggacaactggagctgattataaagcacaagaatcagtttcttgacatctggcaactgagtaagcatcgagtcgatacgcacttcaggctcctgaggcattaagtagctggaagacacgtttgtgtttgcgtgtgcatttttgtaaaggagataatcatcttagccttgataatgagtatctcttcttgctcataagttgataggggtggtttataattctcaagaacatcacgggaaagtgataaaataatggccatctcgaaaaagtgggtatgcgcaaaaccatcctagtccttctcctggtggcggggaaggtgcggcgctttcaaagcattgccatggaaaatggcatttgttgctgtattgggttactttattggtgttcttattttccaggggaaaaaagtctttcaccccaggatgaacaatgtgctgtggaggaagcactggattggagaagggaggaactgttacttctaaagaaagagaaaagatgtgttgatagtctcctgaagatgtgtgggaacgtgaaacatctgatacaaggtggtattcctgagaagtgaacaaagttgagggctctcaaagggttagaggagaacacagtaagaatggatcacagtagcagatctttattttggagagaaggctttaaaattttttttttaatttgcatttgctggggggatcgctttcacctcttttagattcttctttttggtatttatgtccacatttccaaataacatgcttaagtgtctcctggatttttccggagtcagcatgagctgctgacgcccgctgcagaagatgagggcttagagccacacatttctggtctgtgccctgcacacatcacctttccacctcctgttgcttcctgttttctcataacggagttgcatcattgtttagggttaaatcatcaggacccacacggatcacaagtgaaccacgaaagaaaccgtcatcattttacaatttttgcacaaactctctgttttccacagaattacatttcctgtcagatgctgttttcactgcgttaatgatacgctgttttcattgtattaatttctaattccatcgcaatctctgccgagtgtctgaatttccttgaagatcattggtttgacctttgaaaaggaacctgccaaccctgggctgcagacgtagggtggagtctccctccacctcctaggagcctttgcctggcacctgggttagacgtggttcccacgcccccctcccccgctactcactcctgcttcctctgttggcagagcacaccctcactggcttcctgagaaaagggcgtgtaagaggttaaaccctcgaatccttgtgtgtctaaagatgtctgtcctcttactaggtcagtcgctcggctaggtctagaattacagaccggaagtcattttccttctgaagtttcaatgtgctgcgccatcattgcctccacagtgtggctatgtatggagaagtccgatgcagtgccagttacacatccttcatgtgtgtgacctgttttctctttcttgaagctcttgagctctttctgttactcatattctgaaataataacgtgtcttggcctggatctatgttccatcgaggctgggcatgttggctcccacctgtaatcccagcacttcaggaggccaaggcaggaggactgcttgagtctaggagtttgagaccagcctgggcaacatagcaagaccccatctctaaaaaaaatacaaaaaaattagcaagacacggtggtgcatgcctgtattcccaactacttgggaggctgaggcaggaggatcacttgagcctgggaagtcgaggctgcagtgagccgaaatcacgccacaacactccagcttgggtgacagagtgggaccctgtctcaaaaaataaaatattttcagtcccctctattgggtattaataggtaggtctttcaactctagacatcaaaatccttgagttctgggaaattctcttgaatgatttaattttttcttctcttgctggaattcctgttaattggatatgggacctcctggatgatcatctaactgtcatcatttttctctcggattttctatctctgttttttgctctgctcttgagagatttattcagaaccaaactttctgcttaggttttcatgtcagctttcgtatatatatttaatgtagaggaattctttttctcggaatgttcctttttaaattctgtcctgttcttgttcacgttgcagcatcttcccttctgggttattcaccgttttgttttggaggttttgcttttcctggcatcatgtgctgcttcctccaggttcctttcacttgttgatttgttttgattttcctcctatgtctggacattcttgtttgtctgtgtttattaagagaaagccctcacaagtgggttggccctctgcggggtgctgccgtggggtgctgtggctcgacctggaagttggcctgtctcctgaagtcttctgtctcctgcctggagggtgtgggcctggctgccaggtttctgggagccaagagggagaagcgggctggcgggccttggcatcccgtgcgtggtcctcccatggcccgtgttctcagtgtggttctccgccacctccctctgtctcctgtgtttcacaccccatcctccttccccctgagattggataattcatgtcttctgttagcttcctgagaaaggggatgtgtctagaaaggccctttgttctgccatgtatctgtggcctccaatccacacgcccccctgcgttatcctttctagaaaatgaaccatctcttggctgctggggtgaagaagggggtccacctgctgtgtcagggcattggggtgacagttggtgtgctggatggaccatgtcttttttttgggacagagtcttgccctgttgtccaggctggagtgcagtggctcagtctcggctcactgcaacctctgcttcctgggttcaagtgaatcttgtgtctcagcctccctagtagctgagattacaggtgtccaccaccacgtccagctagttttttgtatttttagtggagatgggatttcatcatgttggccaggctggtcttgaactcctgacctcaagtgatccatccgcctcagcctcccaaagtgctgggattacgggcgtgagccactgtgcccagcctggaccgtgtcttaaacagactttgaacccagtcttccttatttcatcaccacctcccagtctgcagtgacctgcacaatgtgtgtctgctttttgggaatcctgtgacataaaactactcagctctcagtgttgcccactgggaccctaggactccatgttaccaggcctcatgtgtcatttaccactggttcagctcgttttcaacttctaaaattttgttcctgttatcctgttcgccattcctcctcctgtccttgtcagtttatgacttttttttttttttttgatatggagtctcactctgtcacccaggctggagtgcagtgacacagtctcagctcactgcaacctccacctcccaggttcaagtgattctcctgcctcagcctcctgagtagctgggattacaggtgcgctccaccacgcctggctaatttttgtatttttagtagagacagggttttgtcatgttggccaggctgctcatgaactcctgacctcaggtgatccgcccatctcagcgtcccaacgtgctgggtgggattacaggcatgagccactgcgcccaactagtttatgactttttaaatgcaatttatgttctgtcattggagtggggtttggcaaagagagtaaataggtgcgtgttttcccactgccatctttacccagaagtttatgatgctttctttatcatgaatattggttaacaaggccaagcggggagggaaagacctgtgaactcttcctgagaaagaaatcctagcagctgtgtgctcttgagttcgctcagagaagtgaggagagaaagtcttaggaaagtgaaataaaatggaatcatgattagagctttgacttctgacactttcttttcgcttctaaagtggactttggagtgcttgcagtaagacactcacaagacctcagcagtaaaagattaaatgacaccgtgacagtgagactgtccacctcctcgaactcgcagagggcaacgcattaccacctgagctcccaggtccaagaaatggctgggaagatagacttgctcagagacagccacatcttccagctcttctggcgggaagccgcagagccgctgagtgagcctaaggaggaccaggaagccgcagagttgctgagtgagcccgaagaagaatcagaaaggcacatccttgagcttgaagaggtgtatgactatttgtatcagccttcttacagaaagttcattaagttgcaccaggatctaaagtcaggagaggtcacccttgcagagattgatgtcatcttcaaggactttgtgaataaatacacggacctggattcagaacttaagatcatgtgcaccgtggaccaccaggaccaaagagattggatcaaggaccgagtcgaacagatcaaggaataccatcacctgcaccaggctgtccacgcagccaaggtcatcttgcaggtcaaagagagcctgggactgaacggtgacttcagtgttctcaacactttactaaattttgtaagttatttgctggggactgtgggggtttggaggggcgtcctgcctcagcctcttcaggagccatgggctttgtggctttgaaaaggggggcggatgacttagagcttccgtcaggggctcctgtgtgtgtggtacttgaggcctgaatatcccaagggctttgtttttacctttgttataaatagtaccactgctccttagccagagggagtttccttgggtctgcgtgaagatcaagaactcaggaaagggcaacaatcctcttttcataacgggcatttgtaaagggtcataggctctctctaggttacagaagccaaaaagcaaaacactttgtcggctgcccaactgcatctcccagttccacccaaaagcggtaaatcagttgtttctgttagagttaagaggtgactcttttgcttttttttttttgagatggagtctcgctctgtcgtccaggctggagtgcagtggcgcgatcttggctcactgcaagcttcgcctcccaggttcacgccattctcctgtctcagcctcccaagtagctgggaccacaggtgcccgcaaccacgcccggctaatttttttggtatttttttttttttttagcagagacagggtttcaccgtgttagccaggatggtctcgatctcctgacctcgtgatccacccaccgtggcctcccaaagtgctgggattacaggcgtgagccaccgtgcccggctgagtcttctgcttcttatgtttttaggtagaccgagataatgattagaatttagctgggcacagtggctcatgcctgtaatcccagcactttgggaggctgaggtgggcagatcacctgaggtgaggagttcgagaccagcctgaccaacatggagaaaccccatctctactaaaaatacaaaaattagccgggtgtggtgtcaggtgcctgtaatctcagctactagagaggctgaggcaggaggatcgcttgaaccacggaggcggaggttgcagtgaaccgagatcgtgccactgcactccagcctgggcgacagagtgagactcttatctcaaaaaaaaaaaccaaaaaaaaaacctggaatcccatccatttacacttgaaccctagtgcacgtcctcgaggaagcaactgctctgggcctttattgacaaagcagaaaaagcaacagtagttacttggcagggttatgtgaggaattgattttaaaatccactttattaaaatgcttagcagaatatcaggttcccaggaatcacagttcatcttgatcagggagaaacagccatgggggtttgatcatccaattcaggggtaagagcttggtgtgcctgttgtcacagcagtggcaaatctaggcattgagggagggtggggctgctgggacggtcagtgcttgcagctcacagattctggggttctggttaatgagttccagtccacagtagagctttttcttgcagactgataacttcgacgactttcgccgtgaaacactggaccagatcaaccaggagctcatccaggccaaaaagctgctccaggacatcagcgaggcccggtgcaaggggctgcaggctctgtccctgagaaaggagttcatctgctgggtccgggaggctcttggaggtaaaatcagcctttggggttgcgtggaagtgtggagaaagttttcagatggcgcactgtgtggcgttcctaaactctttggcaatacctccccttggccaaggactacgtaaagggcagaaagacgttgcctgcatgctttagggagatgggcactgatcatagagttcacaccggtacagtatttcccatgtgctgctgtaaaagccactcaccttgccacaccccgccacttcggaagctgtaaatggctcaggttccttttccttaaaatcttgcccccttcagctttttcttccagtagatttttactggaggacaaggagagttcctgcccacagagaggttttttttttttgtttgtttgtttttttgagacagagtctcgctctgtcgcccaggctggagtgcagtggcgtgatcttggctcactgcaagctctgcctcccgggttcacgccattctcttgcctcagcctcccgagtagctgggactacaggcgaccgccaccacgcccggctaattttttgtgtttttagtagagacggggtttcactgtgttagccaggatggtctcgatctcctgacctcgtgatcagcccgtcttggcctcccaaagtgctgggattacaggcatgagccactgcacctggcctttttttttttttgagacggagtttcgctcttgttgcccaggctggagtgcagtggtgcaatctcggctcactgcaacctccacctcctggattcaagcgattttcctgtctcagtctcctgagtagctgggattacaggcgcccgccaccacacccagctacttttttgtatttttagtagagatggggtttcaccgtgttggccaggctggtcttgaactcctgacctcaggtgatccacccatctcagcctcccaaagtgcaggcgtgagcaagtacaggcgtgagccaccgcgcctggccccacagagagatttttctcacttctccattgatgctgtgcgtttcttggcagcctcttcagttctgtggcttagatgtcgttggcagaggagagaggaagaggcagaggaggcaggaggggcacaggtggcagtgcaggtgtgctcgggggtctgggggccaccacctgctggatctcaggctctggctctcttgggagagccgctgctttcagtggtggactctctggtccacactgatgcacatccttcagtgagtaatttatctgaggggaatgatctgagtgtttcatagttaattgtgaacatgttatttacagctgagccttggtttctttttgtttaaatggtaatgttgtgtggattgaaggaaagagcatacacagaagtgcagtacagtgcctgggacattgaaattgctcaggaacggcaagatatcgtttagtgctattaacagacagtacaggctgggcgtggtggctcacacctgtaatctcagcactttgggaggccaagtcgtgtggatcacctgaggtcaggagttggagaccagcctgaccaacatggtgaaacctggtctctactaaaaatacaaaaaattagccaggcgtggtggtgggcgccagtaatcccagctacacgggaggctgaggcaagagaatcacttaaacctggaaggtggaggttgcagtgagccgagatcatgtcacttcactccagcttgggtgacagagtgagactctgtctcaaaaaaaaaaaaaaaaactacaaaagattaggtgttccggactcttactgaaagcagaaagtggacagaaccttaaaaattcatgaaatatccatttcagcttcagtaaggattactgcccaagaccgagtcttgtgctatcgtggaatagtcccacgctgaactcccctcttctcttccccaggcatcaatgagctgaaggtgtttgtggacctggcctccatctcagcgggggagaatgacattgatgtggaccgggtggcctgcttccatgacgctgtgcagggctacgcatccctgctatttaagctggaccccagcgtggacttcagtgcattcatgaagcatctgaaaaagctgtggaaggctctggataaggaccagtacctgcccaggaaactggtgagtcttattctgtctctaatgcagattttgttgaatagagcattgcttagcaacgttagggcagtgactgtggaaatggtggcacacctgtgtggtaggtttgtacacagccgttttcaatgatatttaaaaagcttttcttcataaatggaaattcaccatcttgttacctagaaagcaggatacaaaattacatgacacatagtaatctctaaggtgcaaaacacacgtggaaaaaagacagaagggaaatatgctgaaacgttgccaggagttttctctgaatggttgtaattgtcattttattctgttactttttgttattttctataattgatagaattttttatcagaaaaaagtaaacatttaaaattagccaggcatggtggtgtgcgcctgtaatcccagctactctggaggctgagacagaattgcttgaacccgggaggcagagatagcagtgaactgagatcacaccactgtactccagcctgagtgacaaagtgagactctgtctcaaaaaaaagaaaagaaaagaaaaaagtaaacatttaagtttaagtaaactacctgtagcagggtctgaattgacgtacgcagcttaactagatacctgggccagcctccggacggctgctctgcatgtgggtggaggaagaagtgacatatggaagggcaggtaaagctatcttcatttttctgctagaaagtcagcagagtttccaaacaaaaccctctgttgtgatttttcctaaacttctcttattgtacttggggaccacagaaggacactgaggacttgggactccacagccattgcttccagcgtcacccccagagggttctctgcattggggacctggcagaatgatggcgtctggtagagaggcaggcgggcggctgctcattcccctccactcctccacagatgtaagtcaagtgcccccatgtgccagccggggcaccaggcactggaggaaacgtggaacagcgagtacaaagcagcactgagtgacagatcatgttgtcagggtggcacctggtccagctggggcgctgggtgggcgactgcgtcctgagccctggggaagcgtggggagaaggctctgcagcgaggcagaggcgggaggccgaccacaggagggagaagggcaagatcctcgctccaaccgtggcccgtgttctctccttttgtccccatagtgtgactccgccaggaacttggaatggctgaagactgtgaatgagagtcatgggtctgtggaacgctcatccctgaccctggccacggccatcaaccaaagaggcatctatgtgatccaggcgcccaaaggtggccaaaaggtgagcggtccccagccctcggcgcagctgcggcccttctgcaggctgctgccagtccaggtcttctggccccaagaaagtgacttctaacctatgctcttcacagatttccccagacacggttctgcacttgatccttcctgagagccctggcagccacgaggagtcacgagagtactctttagaggaggtgaaggagcttttgaacaagttgatgctgatgtctggcaagaaggatcgtaacaacacggaagtggagaggttttcagaggtgagggcgcatctttgcagtggcgctaagctggtggtgtcatctcgtccgtgagggctgtgtactcccaagaaaacggaaaggatttgacttgggatttgactgataagaagggctctgctcttaggcccatggagagtagagttggcacatttgtagggtgcatggaactctagtccgcggccccagagaggtcttaaggcaggcaggcccctgggttagcagtccctccttacgatccgtaggatgaacgctgaagctggcagcctgtccaccgcactgagaaggaggttggtcacccagcaaatagcccttagaaagacacttgaattgcctctctcactctgtaaatcagcaagaatccaaataactaagatttagatggacaaaacagaagtaatcatattgagaatggtgtaccggtctaagtaatagtctctcaattttattataggttctttctctaaagttgatttgtactttacaaatggtatcctttatctctgctgggtgcagtggctcacacctgtaaagccagcactttgggagcccaaggtggaaggctcattttagcccaggagttcatgaccagcctgggcaacatagcgagaccctgtctcaaaaagtataaggtttttttttttcccaattaaaaaaaaaagataatttaaaaaaattaaaacagtccaggcatcatggttcacactttgggaggccgaggcgggcctatcacttgaggtcaggtgtttgagaccagcctggcgatatggtgaaaccccatctctactaaaattacaaaaattagccgggcatggtggcacgtgcctgtaatcccagctgctccggagactgaggcaggagaattgcttgaacccaggaggcagaggttgcagtgagccgagatcacaccactgcactccagcctgggcaacaatgcaagactccatctcaaaaaaaaattaaaaaaaaaaaaaaattaaaacaaatgataccatttatctctacaatgactctttccctgatgagagtgccatcttctcaggtgggttgtgtagatgaggagggaggccttgtgagcgcagatcatgcagtgggcctgtggacagggccgtcttttggcggtaggcctgtgtgctgttgcagagtagcgtgttaccctctcgcatggctctgtgagccaacctcatggttctgcctctccaggtcttctgcagtgtgcagaggctcagccaggccttcatcgacctgcactctgctgggaatatgctgttcaggacgtggatcgccatggcctactgctcccccaagcagggtgtgtccctccaaatggactttggcttggacctggtgacggagcttaaagaaggtggagatgtcactgagctgctggcagccctctgcaggcagatggagcacttccttgacagctggaagagatttgtgacccagaagcgaatggagcacttttacctgaacttctacacggcagagcagctggtttacctgagcactgagctcaggaagcagcccccgagtgatgccgccctaacgatgctatccttcatcaaaagcaactgcaccctgagggatgtcttaagggcctctgtggggtgtgggagtgaggccgccaggtaccgcatgaggagagtcatggaagagctcccgctgatgctcttatcagagttcagcctggtggacaagctgaggatcatcatggagcagtccatgaggtgccttcctgccttcctgcccgactgcctcgacctagagacccttggccactgtctggctcacctggcagggatgggtgggtctcccgtggagcgttgtctcccgagaggtctgcaggtcggccagcccaacctcgtcgtctgtggccactccgaggtgttgccagccgccctggctgtctacatgcaaaccccaagccagcccctgcccacttacgatgaggtgctgctctgcaccccggcaaccacctttgaggaggtggcactgttgctgcgccgctgcctgaccctgggctccctggggcacaaggtctacagcctgctgttcgcagatcagctgagctacgaggtggcacgccaagcggaggagcttttccacaatctgtgcacgcagcagcaccgagaagactaccagctcgtcatggtctgtgatggggactgggagcactgctacctcccctctgccttcagccagcacaaggtcttcgtcaccccccaggcacccctcgaggccatccaagcctacctggcaggtcactaccgggtcccgaagcagaccctgtcggcggcagccgtgttcaatgaccggctgtgtgttgggatcgtggcctcggagcgagcaggtgttggtaaggagagcggcagggtgggcaggccccgtctcccagggactgcccggggcccttcccccctccagcagatgaagcctgtctgcaggtggagaaaccgaggctcagggagggtgtgattcatctgtgggtgtcaatcagggtctgtgccagaaccaggcaccctggtcacctggtctcccacaatgggtattccctgggagccccattcccttcctcctctcagcaaacatctctgcagtgtactttgtggtttttttttttttttttttttttttttttgagacagagtcttgctctgtcacccaggctggagtacagtggcgtgatcttagctcactgcaacctccgttttctgggttcaagcaattatcctgcctcagcctcctgagtagctgggattacaggtacccaccgccatccctggctaatttatttttttttgttttttgttttttgtttttttgagacagagtctcactctgttgcccagattggagtacagtggcgtgatctcggctcactgcaaccttcgcctcccggattcaagcgattttcctgcctcagcctcccaagtagctaggactacaggcatgcaccagtacacccagctaatttttttatttttagtagagatgtggcttcaccgtgttagccaggatggtctcgatctcctgacctcatgatctgccctcctcggcctcccaaagtactgggatcacaggcatgagccaccgtgcccggcctaatttttgtatttttagcagagacagggtttcaccatgttggccagtctggtctcaaactcctgacctcaggtgatccgcccacctcagcctcccaaagtgctgggattacaggtgtgagccaccacgcccggcctgaagtttacttcttctgcccttaaatgccactggcctctttggggttgatgttggtcgtgtgagcaaggggaggtagaattgaagagaaagccatgcctcttgacccacccttcgtttgccatcttgtttcccttaaaaagaaatagtagcttctgttctgttgactttatcctatcaacagtacctcgtcctgttgggataaacattactcttcccctccctgctgaagcctctccttttgctgtgacttttattagctagtcactcaacacataatgacatttcagtcaacagcagaccacgtatatgaccacggtcccataagattagaaaactgtactttaaaaattagccaggcatggtggtgcatgcctgtgatcccagctactaggaaggctgacttgggaggatcgctccagcccaagaggtcgaggctgtggtgagctgcaaatacgacactgcactccagcctaggcaacggggcaaggccttggtcttttaaaaaaagagaaagaaagaaagaacaaaagattataataccatattttttactgtaccttttctacatttttatttttatttttgagatggagtctcactctgttgcccaggctggagtgcaatggcacgatctcggctcactgcagcctctgcctcctgggttcaagcgattctcctgcctcagcctcctgagtagctgggactacaggcacacgccaccacacctgactagtttttagtagagatggggtttcaccatgttggccaggctggtctcaaactcctgaccttgagtgatcacccgcctcagcctcccaaagtgctgggattacaggcctgagccaccgtgcctggcctgaatatgtttagatattcagatatttgccccgtgtcacagctccccactgtatgtaggatgcccccatgctgtcacggcttgcagcccaggggcaatgggctattccacctagctcgggtgtgtggtcggctctaccatctgggtttctgcaggcacactctgatgttcacagtgacagaatcatttcacaatgcatttttcagaacgtgtccctagtgctaagtggcgcgggactctgctttgcctgctgtcctgcggaggcaggaggtgaccaggagagtgagtaggtaacggctgggaaatgtgaaggttcaagagcgtattcttgaatctgatgttatgttgcatcagttttgaattttatacaaagagaagtaacttctagtggatctttatagattctcttactctttgtcctagccctgggacttaatttttctctctctctctctctctatttttatatatatacacacacatgctgtatatacatacactatatatattcgatacatattctatatagatttctatatatattctatatatttttacatatataatatatattctatatacttccatatatactatatatattctatatatacatatatagtatgtatatatatattatatatatattgtatgtatatatatattatatatatatattttttgagacagagtttcgctctgtcaccctaacgatgacaactgcaccctaagggatgtcttaagggatgcccaggctggagtgtagtggtgcaatctcagctcactacaacctccgcctcccgggttcaagcgattctcctgcctcagcctcctgagtagctgggattacaggtgcctgccaccacgcctggctaatttttttgtatttttagtagggacgggatttcaccacgttgaccaggctggctttgaactcctgacctcaagtgatccccccgcctcggcctcccaaagtgctaggattacaggtgtgagccaccactcccagccctaatttctgtattaatgttataggaaagtctctgtacgtgaagaggttgcacgacaaaatgaagatgcagttaaacgtgaaaaatgtgcctctgaaaacaattcgactgatcgaccctcaggtggatgagagccgagtcctgggcgccctgctgcccttcctggatgcgcagtatcagaaggtccccgtgctctttcacctggacgtgacctcctcagtaagtgccctccagcgtcagccgatggccacatcagtaaagacgtggtccccatgtctctgcgtgactcctccccgtgtatagaattccttgtttccacacgcacagtcctgtgaagcttaacagtgggaatgtgctctgagaagtgtgttgtcaggcagtttcctccttgtgtgaacgtcatggtgtgcgcttacactaacctagacgtagagcccactgcacacacaggctttatggtacacactgtcgctcctaggccgcaaacctgtgctgcatatggctgttctgaatcctggagccaattgtaaaacggtgtatttatgtgtctaaacataaaaatggtacagggaaatatagtattaggattttatggggctgcccttggagacatgggccgttgttggctgaaatgttgatgttgatcatcaggatcatcgtgacaaagagcaaaataaggaggggttacttagagttgggagaactcgccatcgtgtcgtgtgtttacacctcgtgcgattctgttcttaggtgcagactggaatttgggtgtttcttttcaagctcctcattttacaatacttaatggatataaatgggaaaatgtggcttcggaacccctgccatttgtatatcgttgaaatcctggaaaggaggacgtcagtgccgtcgaggagctcttcagcgctggtctgtactgtggggcgttttcgcctggcgtggggggctcttgggttctttctggtcttactgaagtggaatggcgcgtttaggagactccacatctttgccttacttagtgcagcagctgaatgcagtgttagtaaagaaaagcccatctttaaactcactttttaatcatgtctgggataaaagtactcttctgttaattagcagtgtcttcaatatttctgttcaattcaggcttcatgctgtatgcccagtctgaatcccagctgtgctctgaatctaggaaattcatctgttgaaagacctcacctttcctaatgccagctaagatgagaaggagatgtttgtcaaaaatttcttagcaaaagagagttttatgttcactcacatacataatacatgtatagcttagtggagaaacttagtttcaggaagttgggttagaaagtgatttcctggctcagaacgcagctcccacagcaatgccttacttaatgtgcaaaagatatgctgtggaaaaaaagactatacagaaagctacatattttcagtgcgtttttcataaaggtccatccaatatagataacgtggagggttaagacacaaaagcatttcttagaaagtcttcttgtaaccatttcattaatgtctctcctttccagcgtacacgtgtaccccagttcagttttcttgacatcttcccaaaagtcacctgcaggcctcccaaagaggtgatagacatggagctgagtgccctgaggagtgacacagagcctgggatggatctgtgggagttctgcagcgaaactttccaaagaccttaccagtatttaagacgattcaatcaaaaccaagacctagacacgtttcagtatcaagaaggctctgtcgaaggcaccccggaggaatgcctccagcatttcctgtttcactgcggggtaataaacccatcctggtcagagcttcggaactttgctcggttcctgaattatcagctcagagattgtgaggcctctctcttctgcaatccgagttttattggcgacacactgaggggcttcaagaagttcgtggtgaccttcatgatctttatggcaagagattttgccacaccatcactccacacctctgaccaaagcccggggaagcacatggtcaccatggatggggttagggaagaagatctagcgcccttctccctccggaagaggtgggagtcggagcctcacccatacgttttcttcaatgacgaccacacaaccatgacattcatcggcttccatctgcagcccaacatcaacggcagtgtcgatgccatcagtcacttgactgggaaggtcatcaagagagacgtcatgaccagggacctgtaccagggcctgctgctccagagggtgcccttcaatgtcgactttgataaactgcccagacacaagaaacttgagaggctctgcctgaccttagggatcccccaggccaccgaccccgacaaaacgtatgagctcacaaccgacaatatgcttaaaatccttgccatcgagatgcggttccggtgtgggatcccggttatcatcatgggagaaactggctgtgggaaaaccaggcttattaaattccttagcgacctgcggcgtggtggtaccaatgctgacaccataaagctggtcaaggtgcacggaggaacaactgcagacatgatctactccagagtcagggaggctgaaaatgtggccttcgccaataaggaccaacatcagttggacaccatcttgttttttgatgaagccaacacaacggaagctataagctgtatcaaagaagtcctgtgtgatcatatggtggatggccagcctctggctgaggactctggcctgcatattatagctgcctgcaatccataccggaagcactctgaggagatgatctgccgtttggagtcagctggtttgggctacagggttagtatggaggagacggccgacaggctgggctccattcctctgaggcagctggtataccgggtccatgctctgcccccgagcctgattcctctggtgtgggactttggacaactgagtgacgttgctgaaaagctctacatccagcagattgtccagagactggttgagtccatcagcctagatgaaaacgggactcgcgtgatcacagaagtcctctgcgcctctcagggtttcatgaggaaaacagaagatgagtgcagctttgtcagcctcagggacgtggagcgctgtgtgaaagttttcaggtggttccacgagcacagcgcgatgctcttagcgcagctgaatgcctttctctccaagtccagcgtcagcaaaaatcacaccgagagagatcccgtcctctggtcgttgatgctggccatcggggtgtgttaccatgcctctttagaaaagaaagactcatatcggaaagccatcgccaggttctttccgaaaccgtatgacgacagcaggctgcttctggatgaaataacacgggcacaggatctttttctggacggcgtacctctgaggaaaaccatcgccaagaacttggccttgaaggagaacgtcttcatgatggtcgtctgcatcgagctgaagattcccctcttcctggtggggaagcccggcagctccaagtctctcgccaagaccatcgtggcagacgccatgcagggcccggctgcctactcagatctcttccgcagcctgaagcaggtccacctggtgtccttccagtgcagcccgcactccaccccacagggcatcatcagcaccttccggcagtgcgcccgctttcagcaggggaaggacctgcagcagtacgtctctgtggtggtgttagatgaggtggggctggcggaagactcacccaaaatgcccctgaagactctgcacccgctgctggaagacggatgcattgaagacgatcccgccccccacaaaaaggtcggcttcgtgggcatctccaactgggcccttgaccctgccaagatgaaccggggcatttttgtgtcacgtggcagccccaacgagacagagctcatagagagcgccaagggcatctgctcctcagacatcctcgtccaggaccgagtccaagggtactttgcgtcctttgccaaagcctacgaaacggtgtgtaagcgccaggacaaggaattcttcgggcttcgtgactactacagcctcatcaaaatggtctttgctgcagcaaaggcttcaaatagaaagccttccccgcaagacattgcacaggctgtccttaggaacttcagtggcaaggatgacatccaagctttggacatctttctggccaatttgcccgaggccaagtgctcagaggaagtcagccccatgcagctgatcaaacagaacatctttgggccttctcagaaggtgccgggtggagagcaggaagatgctgagtcccgctacttactcgtgctgaccaaaaactacgtggcactgcagatcctgcagcagacattcttcgagggggaccagcagccggagattatttttggttctggtttccccaaggaccaagagtacacccagctctgcagaaacatcaatcgtgtgaagatctgcatggaaacaggcaagatggtgttgcttctcaacctgcagaacctctacgagagcctctacgacgcactcaaccagtactacgtccacctcggcggccagaagtacgtggacctcggtctggggacccaccgcgtcaaatgtcgggttcaccccaacttccgcctgattgtcattgaagagaaagacgtcgtgtacaaacactttcccatccccctcattaaccggctggagaagcactatctggatatcaacacggtgctggagaaatggcagaagagcatcgtggaggagctctgtgcgtgggtggagaagttcatcaatgtcaaagcacatcatttccagaagaggcacaaatacagcccctctgacgtcttcatcggctaccactcggacgcctgcgcgtctgtggtgctgcaggtcatagagaggcagggtccccgggccttgacggaggaacttcaccagaaggtgtctgaggaggccaaatcgatcctgctgaactgcgctacgcccgatgccgtggtccggctgagcgcctactcgctgggcgggttcgcagcggagtggctgtcgcaggagtactttcacagacagaggcacaactcctttgcagatttccttcaggcacacctgcacacggcagacctggagcgccacgccatcttcacagaggtgattgtctttctgcacttgtaccctatcccctgtcacccaagagtcctaaatccctcgtgtcaggattcaagattcttccccaggcagcggttagggatcctgcagggagatgctgagacgctgagctctcctccgcggtaagtgtggggagtaggtccagttaaccaggtgctgagtgcctggctctgtgcagtgcaccatgctggtaacagcaccatacacagtgttcacaccaacaaataaagtaccacgtcccaggactgggccaagggcactagggacgcacagatgaatctgtagcccttgtcctttgttagcattagggagcatggagagaccagcacatgaacagatgccatcaatatcatatgataaatgctgtgcttagaggcagcggggagcggtgcagaccaggatgcgagctcagatgagatgttccctaggagaagcccctcgccgatggggaagaatggccgggaagggattgtaggctgagggccttctgtgggcagagccgctgacagctcttagggttcaaggctgtagtgctgagatggggcgatgaggtgcagtcagagagaactactggaggccctcagtgactctgcagagccacatctcagccctatggagcgggcactggaggcacgcttgtctccctggctgggtgaagggagtctgatgaaaggctgttgtggaaaagacgggccggtagggaggccgctggaaccgtacaaaggagaggagcagatggaaccgagagatactcaggaggcaatttggcagggccaataccaccacccagtggggggatggggggtggaggggtccggggcgaccccctggattcctccttagatgagtggacattgcttcatcatgacagataccgcaggaacggacagcaggttgtgggaggctagtgatgatgtccgccggggacaggtttctatgcatcgtgcagctggacgtaggaatctgagctcagtggtgaggcagggattcctgggctagagcagcaggcctcgaggaacgtttcgacttgcactgtgatgggggagtgacctttgggacaggagaattgctgacatctgggggaaggggacagcaccaaccacgaactccatctgaaagcatgagtcgtactataacaggaaatggcatttgtgctgagccctaagggatcatgagaatctcaagtacggaccaagcaggcagagacacgggcctctggggaggagaggaaggcaccctcggggcagggtggggtcgtctctccaatgcctttggccctgtagggcctctcggccccagcgctgccgtgttttgggaaactcctttgggtttggattctgtgccgttgtgtggcaactgcaccgcgctgaacatcgcaggtttctaggatctgtctaaacctggcagcagacttgcaacctttccttgaagtctggcaagtaatttgcatttcttaactctgtagatcaccactttctccaggctgctaacaagtcacgactgtgaaattttagaatcagaggtcacaggcagggctccgaaacccacactcctgtggctgcagcagtttgacaccgagtactcattcctcaaagaagtccggtgaggttccctgccttccctgctgccctctccctccccagccgcagccgtgtggcttctgcgtggcgatggtacccgcgccggttaatgagcgccacagtcacgtgactgtgaaatagatccttgttaaatctctcccagcatccctctcatctccatcatcttctgcaacgcggtgtctggcctaacatcctcctccgagagcaccatcctcggacctcgttaggaggcattccttgggtttcctcccctggactatctgttcttactgaagaaaatcctacctgagtagctgtttctttgtagcctttatgtttcccatcactttggggaattttcttttccatttttttaagacagagaactcacttgaataacttcccttttctttcagaaactgtttaacgaatacagccaaatgtaaaatcctcatttttcagacagattttgaagatggaatccgtagcgcccagctcattgcctcagctaagtatgtttttagtatttttctcagaaactatgtaaaaaacccaaaacgtaggaagtcctagagaattttttccttgaagacagtatagtatcataatcagtatagaaataaaaataacaattcttcccccgcctcattcccccaagtgggattagggaaactgaagagagacaaaaagaaaaggccaataacattacaaaaatagtggaatgggcctgggcaacagagcaagacctcatttctaaaaaaataaaataattagccttccacagtgcacctctagtcccagctgctcagaaggctgaggtgggaggatcgcttgagcctgggaggtcaaggctgcagtgaactgcgatcccaccactgcagtccagcctaggggccagagcaagagcctgtcctccccacaaaaaaggtgaaatgcgagaggtgtaaataatggaacattaacaagctataaaaggatgcctttgaagcctgtgtttgtagacatgttttggtcattattaattttgaattatacaatttgaatttatttcaagttcgagggaaacaacagtaggtaaatgctttttttcctatttattggatatttttatagtgtttgtaggggaagtctgatgctcttagaattaactttgtgcctttattacttaaagtaaaagtgatttctggacctttttgaagcattggatgccatatttcagttcgtggcttaaatctcaacaagaaactggctttggccattggtcatctgaagggaatggcattgcgcacagaactctttgttgaaatggaaaggtccactgggtacaggggctgtttcctgtaatcctagctacttgggaagcagaggcaggaggatcgtttgaggccaggagtttgagaccaggctgggcaacacagcaagacccccatcgcttaagagaaaagaaggaatggaaagttcagctgtcctcacccttagctgcaccggggcaggcccattgaggagcacaagatagggtttctggtcaacgaaggaatgccacttcaaagcagaggacacaggaatggggaagaaaacgagccgctaagagaagatttctcatccccttgtgagagaagaaatcacgatcgcagggctctgaagtttatgtaaaactcatcggaacgggtggccgtgagaccgaaccaacagctcggagaacacccttctgcagctgcacagctttgctttgtttatttgcttgtttttgtgtgtgtgtttgtttttaaaataggtattcttttttttttctttaaataggtattctgttataaatgaaatcaacaaaatacgagaaaatgaggaccgtatcttcgtctatttcatcacaaaactgtcccgggtgggaagaggaacagcctatgtgggcttccacggaggtgagatcagaacatcagtcagggtatttatttatgtatttatttatttatttgtatctatttattttttgagatggagtcttgctctgtcaccaggctggagtgcagtggcgcgatctcagctcactacaacctcaatctcctgggttcaagcgattctcctgcctcagcctcccaagtagctggcattacaggcgtgcgccaccatgcccagctaatttttgtatgtttagtagtgacggggtttcaccacgttggcctagatggtctcaatccgttgacctcatgatccgctcgccccagcctcccaaagtgctgggattacaggtgtgagccaccgcacccagcccagtcagtgtatttatttaagtcatgttggaactgtttctcatttggttctgtgttgtacagtctgaaattagaatattattgttaacctcaagaggattctttccagatgcaattagatttcttaccactgattaccatgaaaacatgaatcctgggatgggaggctgcgtgcacctctcctggactgactctaggcaagctcctcacctcttagcatgtaggtcacacggcgtggagactcccgactcccgacagacactgtcaggaacgcaccgatacgcctgtttggcggggagggagagtggcgggggtcggactatcttcagatctctttttttccaaggaatggtcaccagctatttatgacatagaaaagttggtattccagaaacaggaaagtaagtttacttgaataatttcgtggagaatggaaggcagaccttgccagtgtcccccacccctcactaactgtgatacagcaaatacaacaatgcatgggtgaaagaaccacaggccttatccatgcgtccttcccacgctggccattgcaggtcttaccgttgctgcttatggtgaagctgtcgatgggcatagaatcgggtcgtgtatagtatcgggttgggtggtttctgcgcaggcccattccagggtttcggcttcagggtgccagtcattcattgcgcagcaagataatgacaagccagggtgtgcaatgtccctgcttagggctgagcagcagccgggaaagacacaaagacagttgtgggtggcttcactcttcacagggctgtggcagtctgtccacatcgatgacctccggagatccaccctcatggtttctgatgtgaccaggctgcagcatgtcaccatcagccagctgttcgcgcccggagacttgcctgagcgtgagtcacgaggcggagcccctgggggagcaggtggtggaagggcagatggcaggtgtggagcgtggcgtgcacatggcactaggagcagggccaccgtgtttcgtccctcggcaggagctcggggacacatctgcagaactgactggtggctcatcatagagcaccagggccgagcaggtgcgcttaccacaggctgaggtagagctctgtgagcaggccagccatggaagtgagcacctagaacacgccagagcccaggctggaaggaaggggctgccttgggggctgatcttcatgaccgtgatctctcatctggggacctagcaccacagcaggggccggggaagcctgcactcggaggctgagcacacagactcccagatggcaccgctgccagtccctgtgccaccttctgagtggtaacgcaatcacgtttgcttcgactgcagtgggcttggaacaccgggcggaagacggccatgaggaggcgatggagacggaggccagcacatcaggggaggtggcagaggtggcagaggaggccatggaaacagaaagttctgagaaggtgggaaaggaaacctctgaactcggaggcagtgatgtaagttctggttcttgggacctccccttgtgctgctggtgatgcttctgagctgcatctttaaacgcttttgcattgggagctagaggagtcgccgccgctgtgcaggggtgaggatggcgccccactttcctcacacagtgacggtcttgttgctggttactgggggtcaagggcatctgcaccggcagtttggggggtgcagggcggaggtcggcgtctcttctttgtccgtgaggaccgccgccctgtgctgtttgctgcattgagaccctcatcgcatacgggcggtttggcttttgcccactgtgtcagtggcagaaacggatgacccaaccgtctccaccaacaggtgtcgatcctggacaccaccaggctgctgagaagctgtgtgcagagcgccgtgggcatgctcagagaccagaacgagagctgcacgcgcaatatgcggagggtggtgctcctcctgggcctcttgaatgaggatgacgcgtgccacggtatgagcctccccacccctcttgcccctgcccccacgtgggctcttcctgaggagtgggcatcatttcactgtgtgttgggggacaccctctcaggtttccatggctcagcagaagcagtgacacagtgggaatctaagagcatctctcagattttgctctagaattggcctggccaacggacttcccttcctgggggaggtgggacagaagcactccggagccaacagctcagccacggccatgctgaacgtctgtttctgcctttgtacagcctctttcttgcgggtatccaagatgcgcctcagtgtctttttaaagaagcaagaagagagccagtttcaccctctggagtggttggcaagggaagcctgcaaccaggacgctctccaggaggcgggcacattcaggtactgtgactaaaggaagcaaggagtggctccaatctggtggcagcatggggacctgcctgcagggatcctctctccatccgggccatggggactgagctgtttctttccaaacctctcagccattcaaagctgtaaagtttttccccaagaagcacacagtaggtctggacagtggccaaatggcaggtgctggactcttcctctaatttcgtgtttacagtttttcatactaaaaacttaaaaaaagtaaaacatctgttcttagagtagaacatttaccgacattcatgttgataaccctagaaagggctgctgttttcagtcatgaagttaaaatgacgtgcagagcaggcaggggacaggcgggattttcccagtcctgctgtttgaagaatggtaacagcaaaaccaggacccagcagtatattcactgccatggttatttttctgtcacccatgagactaaccttgattatcttggatgtggccgtgtattgaggaaggaggggtgctctgggccccagacagagggtctctttaagacagactctcagacctcctgcctgaaagcctaagaaaccagtgacttggttatttgggcccagttttcccatctctaaaagacagcggactcctccatgagtccccttccaggtccaagcttctgtgccagtgataggttcgctttgggcctacagccaggtgtgatctgcaggagggaacgtgaggaagaagcggggtgaacggtaatgggggcttacaggggaagaagcggggtgaacgggaatgggagcttacaggggaagaagcggggtgaatgggaatgggggctcacggaggaagaagcggggtggatgggaatcggggctcacggaggaagaggggtgaccgggaatgggggctcacagaggaagaagcggggtgaccgggaatgggggcttacagggggaagaagcggggtggacgggaatgggggcttatggaggaagaagcggggtgagtgggaatgggggcttacaggggaagaagcggggtgagtgggaatgggggcttacaggggaagaagcggggtggacgggaatgggggcttacagggggaagaagcggggtgaccgggaatgggggcttacagaggaagaagcggggtggacgggaatgggggctcacggaggaagaagcggggtgaatgggaatgggggctcatggaggaaaaagcggggtgaccgggaatgggggcttacaggagaagaagcggggtgaacgggaatggggacttacagacaccttcctcgtgaccagagattttctgattctactttttctctagttatccttcgtttctctccttgtcacgccttctgaagggattttaggagatcagaaatattttcatttccctccgttcctccttgtggactctcttgatgcttttttttttttgagacggagtctcactctgtcgcccaggctggagtgcagtgatgcgatctcagctcactgaaacttccacctcctgggttcaagcgattctcctgcctcagactcctgagtagctgagactataggcacccaccaccacacccagctacttttggtatttttagtagaggcgagatttcaccatgttggccaggctggtctcaaactcctgacctcaggtgatccactcgcctcagcctcccgaagtgctgggattccaggcgtgagccagtgtgcccggcctgttgatgcttttgaatccctgactccactccccgggaccagccctgagtcactgaacctcctcagtctgctcttccccactctgctgttcacgcagcactaggcctggctccgtcgtgttctgtggtcaccgtgaggcctgcgcagccgctgagtggtggccagacccgcaccctcagctcacctgccccagggccagcagcaccctgactacctcgattcaccaccactgtgttctggggactggagtcctttgccctctcgggattaaacagcccaaatcctgagagtcctttgtgtcccgaactctgcctgcctgtccagatacagcagaaccaggctcagcggctccagatagggcggaaccaggctcggcggctcccgcctctcccagcgcttgtcccagcgcctgggttttccttctgccttttgtgttcgcgacacttttcctagtttgctgttttctccctctgtgcactgggatgctttattttcccaatagacattttaaaattcttgccaggttcctctgtactatatatttaaaaaatgtaggtatttctttttattctcttcaaaagagaggcttcgcttttcccccaacattaattaccttgtggggttttttttttttcgagacagagtctcactctcgtcccccatgctggagtgcaatggcgcgattttggctcactgcaacttctgcctcccgggttcaagcgattctcctgctcagcctcctgagtagctgggattacaggtgcctgccaccacgactgtaatttttgtatttttagtagagacgggatttcaccatgttggccaggctggtctcgaactcctgacctcaggtgatccgcccgcctcagcctcccaacgtgctgggattagacgtgagccaccgtgcccagccaccttttaattcttatcctttacacaagaattttgaaatagagctattattgttacatgtaaatatatacaacaaaatatatataacaacaaaatgtcttgtagttaaccaattatctttctgtctgcctatctgtgcattcatccatccctccgcctgcctgtccatccacccatctgtccgtccgcccatctatccatccacctgtctatcagacactcagatctagtgtacaaaaacatcaacaggaacaaatacttagttccagataaacatgtgccttcttgtttagtttgatctgggacaaattcattttggtctcttcatctgtattatagtctatctacaacagatttttaaaatatttattttttccaaatgaatcgtcataattttatttatttagagaacctcgatgacttgttctgaaaaatagttacatacaaaaattatgcagccttgcaaaaaataaagcagataagtgcggtggctcacacctgtaatcccaatactttgggaggccaaggcgggaggattacttgtgcccaggagtttgagaccagccagctagggcaacatagtgagaccccatctcaacaaaaaataaaataaaatttaaaaattagctgggcatggtggcactgggtgtgttgttcctgtctacttgcacggctgaggtgggaggatcgtttgagcccaggtattccaggttatgacgatctatgattgtgtcactacaccgcagttggcgtgacagagtgagaccctcacatacatgttttaaaaataaaaaagcaaacactacttcacccttccagtaacctaatgacagtttattagatgtagaattaagttccattccagttccgtctctaatcttagacatctttgtgagtctgttttctaggacttaaaaatgatggaaatgtcaagttattgctgtcgctgtagtgtggtaaatagtagactagttgttttgttaatgctcaagaaggaacaaaatgtcaaaaggtggcagaccgccactctggttcctctgacccgtggtggcccatctctcttctgtgctgcaggcacaccctctggaagcgggtccaaggtgctgtcacccctctgctggcgagcatgatatcattcatcgacagagacggcaacctagagttactgaccaggccagatactccgccctgggcaagagatctttggatgtttattttcagtgacacgatgcttctgaacattcctcttgtgatgaataatgaaaggtgagtggaaggctttctttccctggggagagaaactatcagaacacagcaggaccctaatatgctctcccaagtgctgggtgaaacgcagccctcaacttcagagcaacgttgacatgggtgctttctgcagtaacaataggaagtttggccgggcatggtggctcacgcctgtaatcccagcactttgggaggccgaggcaggtggatcatgaggtcaagagatcaagaccgtcctggccaacgtggtgaaaccccgtctctactaaaaatacaaaaattagctgggcgtggtggcgcgtgcctgtattcccagctatttgggaggctgaggcaggagaattgcttgaacctgggaggcggaggttgcagtgagccgagatggcgccactgcactccagcctggtgacagagcaagactctgtctcaaaaaaaaagaataggaagtttacgaagctctgagaaatttctgttttatctccaccctcctcatttccctgctttcagagcactggttctagccagacccagcatggcgtgacacggagacagtgcgctgcgaacagccccacaatctgtgctccttacccctgggatctgtgctccctccccgtccctcattccctggtggagcggcacagcccccacccccttccgcaggcctgatgatgtgcggctcaggctcagctcccaatagcttccacttcagctttcaggggcttcaattctggatgtagatttataaagaatatagaaataaatgtgcccaggctcggtggctcatgcctataaccccagcaatttagtaggctgaggcaggaaagtttcttgaacccaggggttgaagaccagcttgggcaacatagtgagaccccatcactacaaaaaatttaaaaattaggcataacgtggtgcgcacctgtagtcccagctactctagaagctgaggcgggaggattgcttgagcccaggagtttgaggtgagataggatcacaccactcactgcactctagcctgggtggtgacagagtgagactctatctcaaaaaaaaaaaaaaaaaaaaaaaaaaaagagtgagagagggagggagacagaaggaagaaagagaaagaaagagcgagagaaagagagaaagaaagtaaagaaagaaagagtgagagaaagaaagaaatggaatttgaattgccagtggaaacacttatttaaaagacaaggcgctgctgatgttcatgaagcaaagactctaacaagttgtgctctgtgttacaagttatcaaagccagacaggttcaggaaccagaagacttggttctgcccgagattttgggcaacacacttgacccctgtcagccttggtttgtttttgttttgcctgtgaaacaaagattgcataagacagttccctagttctgtcataacagaaaccctgtactgtgaaacagatcagcgccgtctgcctggcctgttggcccctttgtttttgaggtctgagaagagctggcatcagtggcagatcttatcttgtgttttgagtgacgtctcacaaaccctcttcttatcatccctcaccttattgcagacataaaggtgagatggcctacatcgtggtgcagaaccacatgaacctttccgagaacgcttccaacaacgtccctttcagctggaaaatcaaggactatctggaggagctgtgggtccaggctcagtacatcacagacgcagaaggtgaggctacctcaagacaggtcagattcagcacaggtgaatcacaaagggattgcctgacagtgaaaagcagatgggtggctagaattgcaaggtgaattttggagtttttagttttcacactttgtttgtgcagtaagcgtccaatttacgtcaccgcgtcattttaaagtttctgctgaaggagtgagaggccccggcgggaccagaaacctttcgatcctatggcagcaggagcctgtgagatggtttttagtgccgtgatggccagggatatggcgaaatggggtgtgttctggcaagaggaggactgtcgcctctatcagctggtcattcccattctgggccttctcagactggggcactggactcggaagatgcccccaggagaggcgttctcagaaggcacgagcgcctggagcatcccctactcccaggtgccccatcaggaggcacctcccagctgtgtctcccgagtcacagcccagacacagtgctgagctctgctgccagatgccagaagatttgccctagtccagaaaaaccaacgacaacgcaacacttttacaaaagccatctttcatacatgcaatagtcttttccacgtttacttatcgtaccatttggaagactcagggtggccttcttttctaggttaccattctgccactttttctcaaagcagtctctctcctcatgagcatattcctttctcaggacaataccccaactgaccctgcttttctatgacagcatgcgaattaggggctgcaccccgcccactagaagccagatctttctggcttgcatgctctgtgacccccagcccctgaagagcagcccacttgttcctaatttacttggacccgggggttcctgaagcatgctgtgacctgtagccatgcaacatacaatgtagccatgcaacatacaactcagtcttatctagatgtttctctttggggctagcttggctgtttctgacctaaatttgacactgtttccgccttcctttattttattccactggaaaaatatcctaggccaggcgcagtggttcacaacaccttgggaggccaaggccggcagatcacctgaggtcaggagttcgagaccagcctgaccaacatggtgaaaccccgtctctactaaaaatacaaaaaattagctgggtgtggtggtgcatgcctgtagtcccagctacttggtaggctgaggcaggagaatcacttgaacctgggaggcggaggttgcagtgagcagagatcacgctacccaccgcactccagcctgggcaacagagtaagactccatctccaaaaaaaaggaaaaagaaaaatatcctaaatgtctagacagtgactattccttcaattccctacaaaatcaggcagttggtacccctttgtctacgagctcccattcaacaaggcgtccccattccccttcactccggagccccctggaggcaggggagcgccatgacttagacgcactccaggccgctccttggtttcctctctgcaggactgcccaagaagttcgtggacatctttcagcagactcctctgggcaggtttcttgcccagctccatggagagccgcagcaggaacttcttcagtgttacttgaaggatttcattctcttgaccatgcgtgtgtcaacggaggaggaattaaaggtagatgtttagatactggctaagggtcaggtgtagagcttgcatgatggggactggatgcagacacggagacgtttcctcagctgcctggagctggtgctgtgaagtctgggaacagaacatggtcagcgaagggtgccggtgggtgaaggggtcgcccagtctcctctcaatattcagtgctacaccctcagtccaccgcccaggggctcctaaaacacggagctttctgtgaacatgagaagacctccaatttccttgacatagcttctttttaaatgttgagtttctcttgaaaaaaattaaatacgtaactaaccctacagggtaagaataaacaagtgaaattcaatagaaagtcatacttttgactacctaaaaattttaaacttcagtacataaaaaaggagagtgacaaatttaagaacatccttacagctaatatgactagaggttaatattcttaggaatcaataagaaaataccctaagttttaaaaaatgggtaaacgttataaaacaacaattttataatctcattaagcatatcaacatccaggaaacatttgaaaaattgcttagccttactattaatagcaaatcaacacaacagtttttagatatcatgtttacgtattcattttgcaaagctgatttttaaaaacaacagccgccggccagtgctgcaaagaaatagccaggccacgcggctgacagtgtagcgtgcacagtgggcgccctgcagggctgcgtggcagaacagttgagcaccttatccgatctgaactgctgactctgtcctgaggaaactactggagatgtggacaaatatttggttcacagggatgtccttttcagctttgcttcgaaaaataagaaatagtttaattgtccggaaatacaggatgggcaaattaaagtatggccgtatgatgggttattgagcagccattaaaaccatgtttttcaagtatactcagtcatagggaaagttcatgatgtcatgttcagtggcaaaaagcccagacgacacggtgaccttaacgtgggaggagaggcagatagaaaactggacagaagcaaacgggacagaatagcacacatggtttctaatttcctcttttatggttttccaatagttcggatttcccacggggaaaacataccatttttgtaatttaaaaatatattctaaaagcttttttgaatcccagtttctgcagatggctctgtggtcctgcactaggaaactgaaagcggcgtcagaagcgcccgaggaagaggtttccttaccgtgggtgcaccttgcctaccagcgtttcagaagccgtctgcagaacttttccagaatcctgaccatctaccctcaggttctccacagcctgatggaagcccgttggaaccatgagctggctggatgtgagatggtatggccctcctccgcctgccctgagcaagccttgtggtgcttccaactccactctgggaatggagagcttctggggctgtgttccaagtgggagatttcttcacaaggcacataccttagctgaattcagagatgttaaggacacatctcgctgacgcttctcacatcctagacaatgaaagtttaggtcgcaagcctgggacacaagtatacatgcagctaacagccggggcctctggtgggccggtgggaggggcaccgctcagccacgccctgctgtccgtctccccagaccctggacgcatttgccgcaatggcctgcacggagatgctgacaagaaacaccctgaagcccagtccccaggcgtggctacagttggtgaagaatctttccatgccgctggagctcatctgctccgatgagcacatgcaaggcagcgggagcctggcccaggctgtcatcagggaagtcaggtgagacccaggagccctcacccactgcttcatctggcgcgcgctcaccaggagcctgccaagtgccaggcatgtccatgagaagacgggcaggtgctcctgccatgggaggggctccgtcctcacccgttcactccgcatttgccgaacccttagtgagtgccaggcgtctcattagggtgctggagacacgagaggcggctgtgcattcagggagcgcactgtgtactggggccgtagaaaggcagacgggctattgtgatgccgtgtgagaaatgctgtggtagaaaggacaccccgggcgggcaggtgcacagagcaggacaggccctcagggccagagtccacttccctaaaggtgaggtgggacttgacaggcgcaggatcatgcagtgagcgggttgtggtggtaccccatgcagaggcatcacagtgggacaccgagtcccagctaagctgagcgtctgagagcgagagctgggggcgggccaggaagtatgtcacatagggcttgcttgtaatcccagccgctgggcctggaccccgggtcccgcatctcttctcccgtctccctcctcgtttcacccttgggttccttggtgggagccgagtgagtgagtgagtggcgccctcttttgacagagcccagtggagtcggattttctccaccgcactcttcgtggagcacgtgctcctaggaaccgagagccgcgtccccgagttacaggggctggtgaccgagcacgtcttcttactagacaaggtgagtacttgggctggcctcagcacatgcacggatccacccttttccgaaaggaagaacagcactgacagtgatctgcggctgggagacgctcttttggctctgaccgttttgtctagacatgcaaaggaaggtgatttcatcactaggccattacattttccatgtttaattgtttaattatttaccctctgctgattgctaagtcagagcatatcatttagaagtgattccaggaactgtgtgcagaaaggggctgacgcagggaacatgcttgtgaaaccttcggcagggattacctggcctttggagtgaccccagaacagaccactagcctggccatctgtggaagctgttaccattttcatagtcatggagacaaggatgtcagagaatgccaccggggtttggggtcttcaaaacagtgctgtcaacagaaccaaggaacaggaagccaccatgcctgtcactcaacacccttcataaagctactaatgtggggtggtctgcagaaagaaacctgtgaccctacagtgatgcccctctgtggccacgcagtggtgtccagcaacagtggccactcagccaaacacagcctcagcctctgcctcacccgcacccgtgaccttcacgtgagcacatccagagccctcaccgccagggggtctggaagaggcagcgctggctgtccgacctttggagcacaggaaggtttactaaaaggaggccagcatggatgctggatgtgttgactctgacctatcaaaacatcagcggcttagacacagtatcagctgatttcccacccaggatgggtatgagcagcccaaggctaaggtaccagctccccggaggctggcacggagtcaggtgcccacgctccgtcttgtcccttcattgtccctaatgttcagcttccaccccgtggcctggcgtcacagcctgtgggacagaaagcaggggaggtagaggacaggccgttttccttaagagcccaatcccggacacgcacacgccacaccagctcgtgtctcgtggtcctaaacttaggcactcggccttatctggttgcaagaaactgaggagtttttcgtggcatggtcatgttccaggtggaacttgagttcttctgctgaaggaaaaggcggagagaggatagtaggacacagccggtgccccccttccacccttttccccacacccacacagcatgcagcctctccaagtctcatcatgtctcggcgctctgggagatgcacagggctttcagccaggtccagcgtgggtcataagggccaggtgcccataaacccaaaggtaaaggagctggcccctgcctgctcacatgcccacaggatttgggaggttaggaacgtggggagggttttttttggcgataaaatggcctcagaaacttactgggtttctggtttatttccttccagtcagatctctgtgcaggtaaccacagccaaagaccttacctcgttagttttcctgctggaagcctgacttgtacccctacccagcccccgctgaagagcagcccttgggaccatttgaaacaagaggcttgggggaaagccctgccttccgccgtgaggctggctccctcggccgggcaggaagttgtcgacggaactgctgcaggatggcacgggtgggactgcgggcatggctggcttttagttgttttggatatgtaccttgaaggggaattcctggatcatttgataactctgtttaactttatgcagaggcactgtattgttttccacgggggctgcagcatctttcttacatccccaccagccaggcaccagggtctgaatttctccacatcatgggcaacacctgttactatctgatttttttcataatggccaccgtgataattcattgtggtttttatttgcatttctctaatgactagttatgatgagcatccttcatgtgcttgttgggcatttgctgtcttctctggagaaatgtccattcaagtcctttgcccatttttgaattgggttgttgattaacaaagttattaggatattaaaaatacacacatcacttccaagtaagattaatcccagcaattcaaggatggctcaaaataaaaaaaaaaaaatctgtaaatgtcatcagttatataaattaaaagataaactctatatgatcatttcaaaatgtagagagaaagcatttgataaaattatttggaaagaaatacccttgtcaaacttggaacaggaaggaactctccttgagctcacaatgcccaaggtagacataatattaagatgtctataccaacatcatgcctgcccatcaaattccattagtacagccattaaactatcttgtacagtgatgatgtgtattgcctaaaaaccagtgtttccacttctaactatatcctagagaaacttctcatttgctctcagacatatgcaagaatgttgaatacaggactgtcaggaattgcaaaaaacctaaatgcccattaaccagcagacaggtaactggtgtctttatcagtgggtacaggagtgatctggacctaaggtatcatgaagagaatgagttgcagaagcctttatacaacgtggtatcattgatatcaagttttaaaacattcaaaataataactccatgttcagatatgcttacagctatcctaaaagcagacatttagaaatatagttatctctggggagggacggagggatgtgaagttgtaactatatgcataatgttttgtttctctaaaaaatgatctatcgcagcagcttgggaggctgaaagaaaattttaaaaaatttaaaaattttaaaaaatgatctaaagcaaatattccataaatgctgagatttcttaaagcttggtggggggtatacagatggtcattattattacttaaagtttgaaatatcttagtgagagcggaggagaccttaaaagaaaaagaagagggaaaatcgtaacttgagaatgtagtcccctgacaagcagcataatcacaaaacgagcattcagagttcaagcgttaaacacaggatcacaaaggcctcgcaccccacaccccacacacacggcgcagccttggccctgaatgtggtgctccctctgtcgcccggcctggccgccctcagccctcccccctgctaatgactcctgtccctgcctttcttcagtgtcttcgagagaactctgacgtgaagacgcacgggccttttgaggccgtgatgcgcactctctgtgaatgcaaggagacagccagcaagaccctcagcaggtgagaccttaggtttggatctgtgaaggcgagaattctgaacctctcgtggttttcacttcttctggccagtttctctgcttcagaactgattgcccttcttggattctaggtttgggattcagccgtgctccatctgcctgggagatgcaaaggaccccgtctgtctgccctgcgaccacgtgcactgcctgcgctgcctcagggcctggtttgcctcagagcagatgatatgcccctactgtttaactgccttgccagacgaattctctccagctgtttcccaagcgcacaggtacaacaccctttctctcaagaaagcatcctttttttcattttccttttttggcaaacacaatattcagaaatataaactctattaaccttcatttggtagaaaacctgacctcagagaactatcataagagacgccacttacgtactttcataaatatctggtatctcaagattattctctccccaagacatacacatacagatttcagacaacaaattcagaggaactaagccagaaagtcttaacaaaggtcctcaccagaggcccaaggaatgtagacgccagtgtttttttttttttttttgagacagtgtttcactctgttgcccaggctggagtacagtggcacgatctcagctcactgcaaccttcacctcctgggttcaggcaattctcctgcctcagcctcccaagtagctgggattacaggcatgcaccaccatgcccggctaatttttgtatttttagtagagacagggtttcaccatgttggccaggctggtctcgaactcctgacctcaggtgatccacccgccttggcctcccaaagtgcagggattacaggcatgagtgaccacacctggccgacgccactggttttaatgcatcagtatcattcacagtcactgacctgaggatcaacccacttcttgtctagctttttggagctggttaaaagcagctctggctctctggactcagcaggcctcagcccggctctgtgagtggttggttttctttccttccccttccccccttctcaggcctcctaaaagtggggcaccaggcaagcccagtggatgggttctttgacatactttgggatattgaagggtattgttgccgggtccaaatgatcaaagtgtttccagaaagggatgcatgtaaatatcatctgctgaggttttgaagactagctctaacgggtgagaggagtgacttgaatctttcaatttaaaagtaaaatgccagccaggcatggtggctcacgcctgtaatcccagcactctgggaggccgaggtgtgtggatcacctgaggtcagcagttcgaaaccagcctggccaacacggtgaaaccccatctctactaaaaatacaaaattagccaggcgtgatggtgcgtgcctgtaatcccagctacttgggaggctgaggcaggaggatcacttgaacctgggaggtggaggttgcagtgagcggagatcgcgccactgtactccagcctgggcaacaagagtgaaactccgtctcaaaaaaaaaaaaaaaagtgaaatgctgtgcaaatctcaagtcattctgtaaggaggcatttgggaaacaccatccacctgtcttctgtttctcgtgttctaagggaagccattgaaaagcatgcccgcttccggcagatgtgcaacagtttcttcgtagacctggtgtccaccatttgcttcaaggacaacgctccgcctgagaaggaagtgattgagagcctgctctctctcctcttcgtccaaaaggggcgcttaagagatgctgcccagagtaggttgctttcttcctgtaaacctagcccctcatttcttcatctcgcttctgcatgtctcatgcagtgagctgcctttttctttctggtttaaggacactgtgaacacacaaaatctctctctccattcaatgatgttgtggataagactcctgtcatccgctcagtgatactgaaactgcttttgaagtacaggtaagaacaacatggagacttgcttctggaaagccctggctttttctcttcatcgcagcgttttgttaccaagtcttcttgtcgtgactagtagctagtacatgatcttggggagctttttcggtgagacacagcctggttacttgtactggttgtgtattctgacattttcacatataggcacatgagtttagtattcccacaagcacacgcatctagcaagaagccaacagtgccgtgaagggaccacagtggcgtgagggacatggaactcaagaggccagaatctgtggtgctgagcctggttccacagcagcgcaactttctgatttttcagatggtagcttagaatcctgctcaccctgaatgtcctagatgtctcctaagtttctattcccctgaacatgggctctatttccttggaaaggatgttgacatccaagaatagtatcacctgtggtacttgtatggatctaatattgcagttctcaaagtgttggtatggacccttgggtgtgaggtaggtctctgaggttaaaactattttaaaaattagattactaagataaatttgcccttttttaaaaaacatgttgatacttatgatgatgttacaaaaagcggtgatgagttaaactgctggcccctcacgtgaagacacagtagctggaggtattgttttcttcaccgccatgcacacgtggttttcttcatgccagtttcattttagttttactaaatcttgactcttgaggatttgacttttcaacgttttgtggaaatgggaagcacacacaaaacactcccactacacaccggagtagacagttgcctcacagaaaatcactcatgacaagccctgggttatcagccggctgctgtgttcatggaccgccacccgtgctgggaggaaggatgcacatgatacaggtgtccagggctgggcaggcctctcctggaaatcagcaaagtgagccagcctcagccaaacaactgacaatgttggttggtgatgataacattcaagcttttaagctgaaattaaaattttgaaaagcttatattctccactatgagcttgtgagcttttgaatacttaaagacattttggggcaatttgtggtgatattaatgaatatggatttttttttttaaaacgtagaatacaaatgtgtcaacctttacaagacctgcacagcccagtgaaccaatattttccaaatgaccaatgcctgatgtcatgaaatcatgtgggtcaaaaaagaaaaaaatctatttaaagtatgggcagacctttttgattttaacataattgactgaaaaatgcactgatacagtttcaggctccacattgcaactaacctctagacatgaccatttatcactgtgggcacagcattaaggaataatagccacaatcagctgcaaaaactattaaaatgttcctcgctattccgagtatatgaggacagattttcttcatgttctcccatatgctgcagcgatggggagcagggcaggcaggccgctgacttccaggagccaggccccagggccagcacaggaatggaagaccaaaccactcttctcacggattcatgttttggaaaatattttaaatgttatttaacatgtaatagctttattgttattttaaatgaatgtatatttttgaaaccttttgtttttaatgtctcataattcctaatatcataaatattgataatataacccacataaaagctcttcggggttctcaatttttaagactataaaggggtcctgaaaccaaagtttgaggacagctggtctaaaatgtgagttttatattcctccagtattatgctaaaaggttttccataaaatcttagaaaccacgtatatgtatgtatatgtttatacacacacacacacaggacagacgaccgatagatagatgctcttttttttagtaaggtatgtctccagatctgagagaaccaggaataatatttctctttctgcagctttcatgatgtaaaagattatattcaggaatatttgaccctgttaaaaaagaaagcattcataactgaagataaaactgaactgtacatgctcttcatcaactgcctggaggtaagtgaactctctcttccctgaatttcttttggaaactatctgaaccacatggtttaaaatttacagaatataattttagtcagtataattaacgaatgctctgttccgtgcagaaaagaagaaaggtttcaaagacgcggcttctgccttcagcaacgtatattttggcatttacttgcatatacatacaaaacagaacagcctaggagaatatactgccaaagttaacagtggttatcattgagtggggacattatggatactttttatcttcatatttttatatccaaaatttttataatgtaaataaattagataattttttttcctcataggttcacttttcccctccttcttgtccttaaaataaaaaggaatgttaggtttccataagtcaagaaatttacactgaaacctacagtaacattcttctatccttccttctccacagtcacattggcgactgtagaagcttggggcatccatgtttaaaaaaataatatccttttctttcttgttccttgttcctcaggattcaatacttgagaagaccagtgcttactccagaaatgatgaactgaaccacctagaagaggaaggtcgtttccttaaggcatattctccagcaagccggggccgagagcctgccaacgaggcctcggttgaatacctgcaagaggtggcccggatccgcctctgcctcgacagagctgcagatttcctctcggagcctgagggaggcccaggcaagtcttctctgccttgctttcctttgggtttaaagactccgttatttagaaattcaggaagtatgggaaactagttcttcgaatagactactactgggcttttctacatcccctctcccctggatgtgtttctgtgaatgcctgtgggtaggtccgatgccctctggttggccttgtgtcctacaataaatgccctaagtcaccagccactcacccgctttctcgttggcctctcagagatggccaaggagaagcagtgctacctgcagcaagtcaagcagttctgtatccgggtggagaacgactggcaccgggtgtacctggtgcggaagctcagcagccagcgggggatggagttcgtgcagggcctctccaagcccggccgcccgcaccagtgggtgtttcccaaggacgttgtcaagcagcaggtgagaagcggggccgggcagcacacaaacatgcacccccacagccccatacaccccaaacccacacacccccctaccctcacaccctaccccccccacaccccaccccctcacaccttccccaccacataccctcatacccccacacctcaccctcacacccccacacctcaccctcacacccagggatggtgccactgcttccgcgttccgcctgcccttagcatccccagagccaggaaggaaacctgccgcttgtctgtctggtcctttgtctctgtgcttcagctgatttgccccagcttgtgatcatgtttacactgcctgctgtagggccaaggtgagggcactcacctcagagcttctttaattaggcatcacttctaattgaatttcactcaaggaaagtagaacattcttgtggcctttgctttcagcgaattaaacgtagttcagcttgcaaggtgcgacctttttacctctggcaggcagagacaggcaagagcaagaactaggaatagaagaattgcagaagaggcttcaaggccaggctgggcacagtggctctcacctgtaattccagcactttgggaggccgaggcaggcggatcacttgtggtcaggagtttgtcaagaccagcctggccaacatggtgaaaccttgtctctacttcaaagaaaaaaaaaattagctggacatgatggtgggtgcttgtaatcccagctagtcgggaggctgaggcaggagaatcacttgaacccgggaggcagaggttgcagtgagccgagattgcaccactgcactccagcgcctgggcgatagagcgagactccgtctcaaaaaaaaaaaaaaaaaaaagaggcttcaaggcctctcagtggtcctttccagatacccagaaattaacaaattcttattgtccaggggatacaaaaatggtactaagaaccccggcactgtttgactaccacctggggtttagagttgacatgacttgagccacccggcctcaggtgtggtgcggtgcgccgcaaacggaggaagcaagcacctccccaggtagcgctgccgtcggcaggcattccctgcacttgcacctcttcgtctactgaggaggaagctccctgcgaagagggcaccagactgtcctgcctcaggccaggtcagggaatcccagcttggctgcctttaaacctcgaatgatcaaccacctggttcctgtacccgttcagacggttctttgcaagacattcctcccattgttcacccccaactaacctctgtattccaggggctgcggcaggaccacccaggccagatggataggtacctggtgtacggcgatgaatacaaggctctccgtgatgctgtggccaaagctgtcctcgagtgcaagccactgggcattaagactgctctgaaggtaggatgggcccgtggcttctctctgataccaggtggcatcccttggagcctgcatgttccctggtttatgtcaaatgatgcagggtgatggaccactgatgcagcccatcacgtgacactgtattggaagtcacgtgcccacagcctccagggcgcacctggctagtgtgcgtgaaccagtggctggaacaggacagctatgacagttgagctgggttgacagatttgctgtgtcttgctgatctgccaagtccatcagcagcgccttttgatttatgcccattacttcctttgagaccctgctggaaaacagtctaagaaagatgctgacacaactattaatagcaaaattcatacctagatgtattcataattcagatatgcatgtgtgtttaataaaaatacatatgttggtgtagtgtgggaagttaaaaaatataaagatgtttttagaatctaacctttaaattggtctggtcttgcttcctttttgagtccctgtgccaggaaaagaggaaatggaaaatcctctttctgctcagaagtttctaagaccagtgaaggagtcagaagaacagatggtgattccgttgcttctgtcattaagctggctgctaaatatgcgttgagtttaatctgagagtatttcaggaactttgtagcccaaaagttgctcgccagaagactgcccatgtggggcatgaccccaggtgtccaggcctggaaaaggctccttcccttttggtgggttgagggctgaggcatgtgaaaagtttcttttcacatgcaaacttcgtgggcctctggcccttaggtagatctggcaggcagcggtgcgggggcgtctatcctataatcctagcactttgggaggccgaggcatgcagatcacaaggtcaggagtttgagaccagcctggcaaacatggtgaaaccccgtgtctactaaaagaaaaaaaaaaagaattagccggacatggttgcgtgtgcctgtagtcccagctactcgggaggctgagttagaatcgcttgaacccgagaggcagaggttgcagtgagccgagatcatgccactgcactccagcctgggtgacagagcaagactccatctcaaaaaaaaaagatgtgttgagcttttaaattcttacttgatacccttgattttgcaggcctgcaagaccccccaaagccagcagtcagcctacttcctgttaacactgtttagagaggtggctattttgtacagatcccacaatgcaagcctccaccccacgccagaggtgagtaaccgcctgcagggctgtgttcaaagtctcagtatttggagggattttattgaatagaatgaaagttatcaacacaaatcataccataatttttttatctaggatagaggttctcaaccttgttatgtggaggaacacataaccaagctgtttaacccaaagcttgtagaattataatgaaaactaaagccaagaacataagataatgtttaacagaatagaatatcaaaattaatgcttacgtatgtggatgctgtgtttgtatatgcacaattctcttctctgaaaaatttccccctcaaatggtggtgatttctccatatttaccttgatatttgatgtgtatttggtgtcagtgtatgtctaagagcaattcacacaatattctttgatacatcttaatgttaagtttttttcctgtcagcaatgtgaagctgtgagcaaattcattggcgaatgcaagatcctttcacctcctgatatcagccgttttgcaacatcgctcgtggacaattctgtgccattgttgagggcggggcctagtgacagcaaccttgatggaacggtgacagaaatggccattcatgctgcagccgtccttctgtgtggacagaatgaactcttggagcccctaaagaatctggccttctccccagccaccatggcggtaagagtaggccacaattccatcggccttcactggaacaccccccagagcttgtcactgtagagaccgagctgcagctgtgggaactcttgagcatctttatctcctcagttctctgcctttgtgtcacctgattcttgagcacacaagatagtgacagacttgccttgccctttgttatttcacaggaagctgttctgttttcttcacagacagcttgagaagtccagcagaaggaaagcagagttccctttcttcctctaggcctcctgctgagcagcagcacccaggtgacaagctcacttatctagagctgtctctgtcttcttgtttttcagcatgcttttcttccaaccatgcctgaagacttgctggctcaagctcggaggtggaagggtctggagcgagtccactggtacagtaagtgttggggtctagatgaccccacactcctttgagcttcaaagggtgtccagatgctatgaagcattgggttcgacttggggtccacgtggtttgtgcctcagggtccaaaaccacctgcattctaccggtggcgtctgcagaagacgaatggcttgaaggagctggcactccgccggctagatgatccaaaccatttcatttctttgtcgtgtggaaaaggccctctgtgatgcacttctgttctctggaatatgccattttgggagaagggagggactgggaaccacatcagagacgcattcaaaggcccaccacaaaacaaagtttttgacacaaagctcttctgaaatatatgaaatatagaaccgggagactgactcatataacccatgacatgtaaattttgctgttgcctgagtaaatattttaaaactagtttttaaagttgttataaaatatgctcatgacaaaaaaaaaaaaatcaaggaaaatagaaaggtctagaatcctgtccaccttgcctccaaaagtacccctggtatgggcctatattctaattgctctttacttgataaaattaataaaattagactcagacatttttcactgacaacatacatttattaagcttcaggcaggtgtcatgtaacttaacaaattagcgtgggatgctctggacagtcattctcatattgtggtcagggccagagagtagagagttagctttcccttttcaatgtgggtcattgggtgaaacctcattagccaatgtgtgtcctgttctcttcacagcttgtcccaacggccatccttgctccgtgggagaggtgagtcttggtatttaagatagggtttgaggggtggcgtgcactcctgggttggaggagggggatcgtgggtcaggagagtgaggctctcggccttccaggagagcacaggctcaccgaggactgcccagggtgctctgagcagggcaatgccaatggcgctaagggtttctagcccagggcttctcagactcagcactgtggacgtggctctgcggcgtgggctgtcctgtgcactgcaggctgtctggcagtatgcctgacctcgagtccctggatgccaggagcacccactcctcccagtgtgacagctaaaaccagacattgacaaaggtcccctaggaaagaaaattgctactggttgggaactgctgctagccattctttctagccactgcagcatggggtcagtgagccttgtcttgatagaatggcaaggtgttgcctggaccacaggctgcattattagccctcagaggaggtgtggtccagatgccaaaggaaaaagccacgtgtaggctgtgcgccatgggggaagaactgttgattattcctctctggattcccaagcatctagcctagagccctccatacacagtatctgtacttgctgagcaagaggctggtgggttgagctgacacgtggtagttagttattagtattacttacttggttgagatatgtctggctctcttacccaggctggagtgcagagtgacatgatcatagctcactataaacattgaactcctgggctcaagcgatcctcccgcctcggcctcccaaagtgttgggattatgagccactgtgcccagcctgatacacgtcatttaataatgtatataagagatacggagggagaaaaactgttacatacacttcatttttctgagcttcaatcacttccttgtccatgaaatgaggacgctgaaatagagtctatccaagaatgctcccagctctgaaattctgtaactggtttggtgtgttatcagccgtgactctcagtatattgtggcacaatatctgattttgaaaaataagcctttggaagtagattatgtgattagatttttttaaataaaaaagtccaagccaggtgtggtaggtcacacctgtaatcccagcacttcaggaggctgaggcaggtggattgctagatcccaggagtttgagactggcccgggcaacatgttgaaaccccgtctctacaaaaaaacacaaagcatcagcagggcatggtggtgcatgcgtgcatgcgtgcatgcgtgtggtcccagctacttgggaggctaaggtaggaggattgcttgagcctggggaggtcaaggctgtagtgagccgtgatggtgccactgcactccagcctggaggacagagcgaggctctgtctcataaaaattgatatatgaaaaagtccaaatgaatataaggaagtcagtttggaagctcttctagtattcttggtattagatcatgaagtgccacaggctagtgtgatagatggagggatggaaaaagtgctgaatacaagaaaggaaggttgaattttatatatttgtctataaagtgtcactctgggaataaagcttaaattgtctcacttatttaaaaaacagttccagtttgcccacgtgcaacattagtgagtacctaccctgttcccatgggttctccacccacccgaaacaagcacacactgggacaatctgagggtgctcacgtctgccggtgataaggaggtgttcatttgcatgatggcatttgtgcataaaatggtactgctccagaagtggttctagtgccctgtcttcaccctagtgtggcaggccgatggaacagagcatctgcattgactgccatgcgccgattggaggcattgaccacaaacctcgggacggctttcatctggtcaagtatgtgggtcaggattctatttcctaagtactcaaactttggggtgttgggctgtttttattccagctgataaagtgatactcaagatagtactaattactccagtacatgtgggcctgtgtcatattgaatagcaatgccaaagtcccagcagtcacacagcagggaggcatctgatctgttgttggatccctgggccctgaaatgcaaagcaggctaccctttaacagctgttaatatgaatacaggtgtcttccttttgggccttgggtgcaccttctgtagaaatatgcatgacataaacagatgatctaattcacgaggacatctatgtctgcaggaccaaaacctgggcatccgtctgtctcagcagatgccatctcacttgccagcaatcttagctttctccattttttattttttgagaaaaatgaaggagacagacatagtcttatgaaataccagacttcagaatccaggtacaaatccgatcccacaatcccatgctgagatgaatgtggttctaaatgctcctttcagagagtgagtgggacctgcgtgggggcctcacattctgactgttccctgcagtcacagcttaaaatactttcatgttatctccagaaactgtcacagtgtcctccatcctctaatagttttgccactgagagcatcggccacactgcatctcctctctgccggactttagatcccggtttttcctttggggagatgagaacaatatggacacccatgggatgccgactgtcctcccaaactctagctgttcttagcccaaccgctcctctcctgacaaagacttcagtggaaaagacgggtccaggcctgcgtcttaacaccctgcccggggatcagcatcaataccacacagcgcagccacctgacgctgagaatgcggtcgggtctggtccaccggaaaggcgagtctatcatgagagagactcttaggaacatggtccaggctttgtggaacagcaagtactcttcacataactctcttctcagccgtaagcctcactccaagtgctgagaaagtgcagcgtgccaaagcggccagcctcagcctctgtcttgtgttctctcgttctttccagagacaaggcagacagaacgcagaccggccacgtgctgggcaacccgcagcggagagacgtggtgacatgtgaccgagggctgcccccagtggtcttcctccttatccggctactcactcacttggctctgcttctgggagcgtcccagagttcccaggtataacccagtgctgccaaacaatgggctcagttaagaacctgctttcgcttcttcccagggagtccttttgtcttgagtcctagctgccatctatgcgttttggagataattagtctacaaagtaatatacaagttatacatcttcatgtttccccctgtggcgtatgatggtatggggggaactactccccagattatacagaatccacttcaaattaacactctgtgtctctggtccacatctgggagtagagaggctgacatcttcattattttacctgtgtcttcattgtagctagggaagaaagagcacactgcataaccaagatggccaacagtacaatctggatattctttatctcactgtaacaacagaaaagccagcagccgttccgcttgctagccttcctttcacctggatcactccgccgttttcatcttagaaaccgccttccgactctatgctggtgctccactcccaatggcctctaccaggctcaccatcttctctacaaaccagatccccgctgaacactctgttccgttgcccccacaggctctgataaacatcattaagcctccagtgagggatccaaaaggctttctgcagcagcacatcctgaaggacctggagcagttggccaagatgctgggacacagtgccgacgagaccatcggcgtggtccacctcgtcctgcgcaggcttctccaagagcagcaccagctctctagcagaagtgaggaaaggggcaagggctgggcggggatcacacagcacaacggcagcgcaagcaggctcgctgtcttgtgggccaccccacacacagccagtctgagctctgtctgtgctgttgctggaaagaatgagagaacacacagagagaaaaccgtgtctagggaaggcgatgcctggggctggaaaaaggaagcactctgcttgcccagaggctggaaggagctgctctgttccctccattcacccctgcctggctaagacctgcggtattcgggagcgtctgcacgcaagtgttcagtgtgcatatatggggagtcttcagttccgaagtcagccccgtaggtcattcccctaccatgctgggagcacgtgtcgtccacacagagcgtgcgtgtcaaaggatcaatcaccatcacagttgtgtgctgatttattaaatgtttatatgtccacagttatgttaaaaaaaaaaagctataaaatattgtattcactgagctaactttctattttaaaaatttaaatccatacagaaagaaaaggtctgtaagacaacttagtaaaatggttatatggttatctgtgagtggtggaattaagagtgattttcttttgctaatctgcaaaaatcacaatgaccattgtgaggacaatgttaatttaaaataataacaataatagcaagaagaagtcctgccccatgacaagaaaatctgctcccacctcaggtacttctttgcctgaaactggcattcctatttattttccattttgaacaatctgattttattttaagcctcttattctggtgggatttcagcaaagtgagcacacccagagtcacactgatgaaatgacagaatcctggaagcaggtggacagttcccgcagcactccacatctgtgtggtctgcctcagggtttgggtggcagcagctgagacggctggcggtagcctgggccactcttactattgagctcaagttctgttctttcagtaatttttttcaaaatgggtctaagattacaattatgtaggatagaggaatttttagagattgatgttatcttcaaaaggtcattaagttggtggtaacaacaggaactacttcaaaatacttagattaatttagaaagctattacctcaaaacgagtgttatttctattaaacacttatttagggtttattatacgcagactgctgtgttctttgtgccttgggtaacctacacatttggagtttttttgtagggcttttaaattttgacacagaattgtcaactaaagaaatgaggaacaactgggaaaaggaaatcgcagctgtgatttctcctgaactggaggtaagcagtaagtgctgacagctgggttgctcctcggtccagaaaggaagggtcccggcgtctgctgaatgctccttgcctgttgcccctcgtagcggtgccagcaagagcctttgactgagccccagattccaatgctccccacctcgagtcactccatcctcctcctgtccccaagtgctcttccctcctacagctggtcatgaagtcagtccgaggaattcctgggaatccagcaagtgcaggcagtgtttttctctccattactttttacagcagaatgtaatgtacgaggtagagaaataaactatcacatatatacccattaaaaatgaactgacaatcatagattaattattcatctagcagccagaatgttagtaagagaaatataggtttctgaatctcattctgtttggggagacatacatctataaacaaacaacactgaaattagaagatcaaagggaatacctgattacatgctcagagcaggggacaaacgccctaatatgcagacacccactggtggagttactgggtgttacaatctgtttgtagcaatacctcacttccagaattttttttttcattttctccatccagcatctagataaaacccttcccaccatgaataatctcatcagccaagataagcgtatcagctctaaccctgtggccaaaataatatatggtgacccagtgaccttcctgccccacctgccccggaaaagtgtggtccattgctctaagatttggagctgcaggaaaagaattacagttgagtacctccagcacattgtggaacagaaaaatggcaaagaaagagtgcccatcctctggcatttcctgcagaaggtatgtctggcttactgtggctccctccctctttcggtgcagagttccccagcaggcctgaaggccctgggcttttacgtagtataatcattcttaacagactattccagtgctttggttttgaataggatgtagcagaagactcagggctagagatcttcatacatatcaaactgtatgattgccagaagcgtaaagtcacagacgaaatacacacccacgttgggattagcagtgacctgtggggaagctggaggccaggagaggacctcccctcatcactcagccagacagaaaaggatgcagctctttcccagccgctctgttcctctctgtccacaatgctggagcatgggcagatcaaacaaaactcctccctgtgcctaagcatcgaggcgtacgtggaagacgggagtgagtgggtgtgtgccggcggtgctggggtactggggagcagtcaagtgtactggccacatctgttggaattggaaatatactttcctaactttcacccatttgcactttcattttctacaacacattgtctaaacatttctctccatggactattatttgctgtctagcaaggatgaagacgagttggaaacttctgttggtcagttgaggagtatgagttcacaatgacaggaaggacttcctgtcaatactgtggcctctctctcagatgcagtttcactacgtcgaagatgcttagatcctaggtcttcggaaggacacccaggaataaggccagccctcgctgcctaagctctgggtctcttctttcagcagcttctctccgtacccagccagttacatgggcccaagggacagatttccttcatcagcctttgatggacgcggctgatgcgtcagctccatagaggctgggctccctcttcgccgccctccatttctagcacactgcactgtctgtagacttgtgggaagaacttttcccgttttcaagctccacgctgcatcacaggaaatgacactgaccagattaagctacaaatacaagtctcgcagccagtctcaaagtctgtaaccccaataacattttttaggtaaataaaaattgttactgggtggtcttcccttctccaggaagcagagctgaggctggtaaagttcctgcctgagattttggccttgcaaagggatctagtgaagcagttccagaacgtccagcaagttgaatacagctccatcagaggcttcctcagcaagcacagctcaggtgtggctctgctctgacaggaccaggactgtcccgcatttggcggttcgaaaggatcactgcataggggaacagggtggggcggaggggaggaggcgctgatgggtgctctatagcctaagcccttaccatgcggtgaagggtgcttgaaccccaaaaacatattagaagctttcgccacagctgaaaagcacctccctctctagctcctcaaactcggctcactccttcaaacagcacctcagacatgcttgtgactgcacaaagcaggaaagatgggctctcggcagagcatgtaactagggtggtttggccctttcagggggttgctatcatacggttcttaccaagtattctgttcaacagatgggttgaggcagctgcttcacaacaggatcacagtctttctgtccacatggaacaaactgaggagatcgcttgagacgaacggttagtatcctgtcccctgtaccactaagcgttccaggagagcctcgtctgaaagctcttctcgtcagcctgactcggcccatccctgtcaacacccagcactgtgtttgtttgtttttgagatggagtcttgctctgtcgccaggctggagtgcagtggcaccatctcggctcactgcaacctctgcctcccggattcaagcaattctcctgcctcagcccctagtagagacagggtttcaccatgttgcccaggctggtctcaaactcccaagctcaggcaatccacccgcctcggcctcccaaagtgctaggattacaagcgggagccactgcgcccagccagcactgttaacgcttaacttgtgtctcttttgatggtggtgtctggataagtaaaataatgtgtcaggaaaataaaccctcagtactcttcagtccctaaatatggcatcaaaagggagctgaaagcatttgaaactctatcagcatatgagatggggcagaaccgagacccggctcccggctgtgtgtggagctgatggcttctgcatccctcctccccacgcctagattctgtgaggagttggaactcctctctgcttaagcataaccctgtcgtttaaaggtgagatcaacctacccaaagactactgcagcactgacttggatctggacactgagtttgagatcctcttgccacgccgacggggcctgggcctctgtgctaccgctctcgtcagctacttgattcgcctacacaatgaaattgtctacgccgtggaaaaactctccaaggaaaacaacaggtttgtgcacgagccaccaggaagtggtgcctgctcagcccagagtccctaagcccagtggggcagacacaagcaagcttcagccccttccctaacagacactcactccttcagccgcccccaccagtgacccgccccatacttgggtagggttttccactgctccaactgtgagaaatgggagcctgctccctgcaacatagagccctaggcccgcatgcctggcctggacgctgagcgctgtctttctgcccctcagctattccgtggatgccgccgaggtcactgaactgcatgtcatcagttatgaagtggagcgggacctgactccactgattctctccaactgccagtaccaggtggaggagggcagagagaccgtgcaggagttcgatctggagaagattcagcggcagatcgtcagccgcttcctccagggcaagccccggctgagcctcaaggtagggctgactcctgccactgctgctcatttggtgtgtctgttgtgaacaagcagcccttggtgtgtttctcgagagagggaagcagcacctcaccctgcagtctggtctgtatctcctccctcacacctgcagctcccgaggccaccacgccacctgtatctccgggccgcagggctctcctgagccctctcctgcagggccatctgcacctcagtcccccaaggaactgttgaggtctttttttgaaacagggtctcactctgtcaccgaggctgcagggcagtggtgccaagcctccacctctgggctcaagcgatcctctcacatcagcttcccaaatagctgagatcacaagtgtgcaccaccatgcccagctaatttgtgtattttttggtagagatggggcttcaccacgttgcccggctggtctcgaactcttgggatcaagggatccacccgcctaggcctcccaaagtgctgggattataggcgtgagccactgcacccagctgattgttgaggtcttgattctaccagttaatggcaccaccacccccacagcccctcttccttcagcctccatgggtaacctgccagcagatgccattagctgtgccttctgtgtgtcctcacctgactgccaaagcccaccctgtagttaaaagcatcctgtacgttggactgctagccactcctaactggtgcccacctccaggttcttcagtccacggcctaaaacccacatctggctctcttcatcctgtgccggatggacctgcctggcctctcatggcatatgggataaagccgacactctgttgtctggtatgggaggccctgtagctcggcccagcccaaccttccagccctgcctccagccacttagcccatttccctgaactgcatcccgtgacctcatgcactgaagccacacagcaggcactttcccatctctgttctttgactggacgcacttgttccttccagctgcagtcatatctactgtacttatgtacggtaccacccgcaactgggccaggaactgtgagagcccatggattttttttttttttttttttttttgagacggagtctcgctctgtcacccaggctggattgcagtggcgcaatctcagcttgctgcaagctccacctcccgggttcactcatgccattctcctgccgcagcctcccgagtagctgggactacaggcgcccgccaccatgcccggctaatttttttgtatttttagtagagacggggtttcaccatgttagccaggatggtctcgatctcttgacttcgtgatctgcccgtctctgcctcccaaaggctgtttttaattcattctcacagccatttcctctggcagagtgactgcctgtgcatggtctgtgcctttagtggctgaatgaataaatgaatgggatatgcacaaatacctgttgccctagcgcctcctgtggcgaagcaggccacgatgatgtgacaatatcttgtcatgtaattggctgtgaggactccgctggattcccggttgtgttactatttccatagatggtgggttaatgacggagaggggcgctcttagccaagggatacacagggcagcgcggcactacgctgcagttttccggctgcagattctgtttgtcatctgctggaaatgtccacgatggatttaattttaaaaaacttttttctttcccaatttagggaatacccactctggtgtacagacacgactggaactatgaacatctctttatggacatcaagaacaaaatggcacaggtgatcccgataaacctgatcctgtgcacggggctttctgccttctcagtgtgtttccctccgtgttaggcctactccagccttgccccgggtgtttgctgtgagcccacagtttctgcggcctcccttacagagagcaagcaagacagcaaatcagcaagttttcttgtagagtaaaagcagattgacatcttgtgggtttgattcttaggaatgatgttgatgcatggccatgcctgctgaagcgggaagtccatggaaccgatttgttcctgctctccgcatgcgggtactgataggtagacctgtgtgtctccatggcctccaggaactgcctgcacaccgtgcgcccaagtgtcagctgttagagagttggccccccgcatgtggcttgggcagtgaaggggctcggctctcttaccaggtggtgagatgccagaaacccagcccacagacatccctctcctgcttttcatttcccaggactccctccccagctcggtcattagtgccatcagtggacagctgcagtcctacagcgatgcctgtgaagtgctgtctgtcgtagaagtcactctggggtttctgagcacagctggtggggatccaaacatgcagctgaatgtgtatactcaagacatcctgcaaatgggtgatcagacgattcacgtgttaaaggtgggtctcacaccgaaaaggaaatcagcacagcccctcaccctggtctcctgcttcccgcgagggataggagcattcagggagtgccactctaggcgctcctgaaaaggatggggagacaagaacaactgctcacccagtcagtccagcataaacaggacacaccagggacagtagagacagacacgcgctagaaatgccagcagtctagatagagcccaaatgtgactgagtacatgaggcccctgcaaacagcgtgatgtgagcgggctgtgaggtgccgcaggagggaactggtagataggacagagatggccttcacaaggagggagatcacattagtacagggcagaacgaagagaagaatgcctgtgtggagagcactcaggctccctggtgcacgacatgagtgggggtgtgagacctcagcccccactcaggaattctattccttctgcaggccttaaacagatgccagttaaaacacaccattgccctctggcagttcctgtctgctcataagtctgaacagctgctgcggctgcacaaagtaagtctggtctcttcctctctgctggacagagggactgcgctcccttctccctgcaggctttaatgcttcatttgctcttccgtcgttttaggagccatttggggaaatcagttcaaggtacaaagcggatctgagcccggaaaatgctaagctcctcagcacattcctaaatcagactggcctagacgccttcctgctagagctgcacgaaatgataatcttgaaactaaagaacccccaaacccaaaccgaggagcgcttccgccctcagtggaggtatggatttgcacacctatggggcggggcagacacaatgttgtgctgtctctcctgtgatcttctatagacacaaaaatagttcttttcttaccacagaatcccatttcctgctttttgtcattaccagggcacctgaggactggctttttggttttaatctctactgggttttctttaagcaattacacaagtgtttttcagacaagagtcttgccctgttacccaggctggagtgcagtggagtaatctcaactcactgcaaccttggctcactgcaacctctgcctcccaggttcaagcgagtctcatgcctcagcttcccaaatagctgggactacaggcgtgtaccaccatgcctggctaatttttgtatttttagtagagacagagtttcactgtgttggccaggctggtctcgaactcctggcctgaaatgatctgcccgctttggcctctcaaagtgctagaatgaaaaggcgtgagccactacacccagcctaaaagtcatatattctaattttataacaagtagactatgtcaaagagaggtacattttaaatttgatagaaaaagctatcctaggccgggtgtggaggcttaccctgtaatcccagcactttgggaggccgaggtgggtggatcacctgaggtcaggagttcaagaccagcctggccaactggtgaaactctgtttctactaaaaatacaaaaattagccaggcatggtggtacacacctgcagtcccacctactcaggaggctgaggcaggagaattgctttaacctgggaggtggagattgcagtgagctgagatcgcaccactgcactccagcctgggcaacagagggagacttcatctcaaaaacaaacaaaaaaaagaatagaaaaagctataccaatgtataaagagtgtatgagaatactcaacattggatattatccatcttttacatagttgccaatctaaaggccaaaatggtatctcattttcagttgtatttccccatttaccgtgaggctgaacatgttttttatatttatcacccatttgtatatcatcctctgaattgcctttatgttttattttttgagaccgtgtctcactcccacccaagctggagtgcagtggcgcaatcttggcttagtgcaaccgctgccttctgggttcaatcgattctcctgccttagcctccctagtagctgggattacaggtgccaaccatcacgcccagctaattttttctattttagtacagagacggggtttctccacgtggccaggctggtctcgagctcctgacctcaagtgattcacaagctttggccaccacacccagcctaaattacctcttcgtatctttttcttttgcgctttgtctctgtaatggttgtgagagctctttgcatagaacaggggttcatcttctctgccgtgtgccacagtgctctatttcagcctttaattttatgaagtcaaatctgacagaattttcctataaagggtctctatacaaaaacacttactaggatcttccttatcccaggattataaactagccttttttttttttttttttttttttttttgagatggagtcttgctgtgtcatccaggctagagtgcaatggtgtcatcttagctcactgcaacctctgcctcctgggttcaagcgattctcctgcctcagcctcccgagtagctgggactacaggcatgcacctgcccggctaatttttttgtacttttagtagagacgggtttcaccatgttgaccaggctggtctcgatctcctgacctcaagtgatctgcccgtctcggcctcccaaagtgctaggattacaggcgtgagccactgcgcccggcctgtcctctctcttcttgtgctttcacatacttgttttattcaccagtttatgtttaggtgtaaagtaaggatttaacttgatgttttcctgactagatcatcaaactccagtcttcctcaccaatatgtttcctatttgctatcttcctccattatgctatgtggcatataccatatacatttatgttctttcaactttttcaacaagtctttactagcctgtgcttttcatgtagataaaaaagatccctttcctagagaatttccagtctttgttaatgtgaaacatgtaatagaatacaaggttttttgaatggtgaggccttgtttatgcaaccctgtaaataaacatcaccttgctagagggcctaaagtcatgtgaaggggccagcacagggcttgctccgtgggcttctgtcgtgtttgtgtactgcatgtgggaagcagcagtcaggcaccagagccttgaacccaggatgctagtcccagttcaggagctcaggtcattgaccttaaactgctcctcaggatttctgggttttttttttttctcgctctgtcgcccaggctggagtgcagtggtgcaatctcggctcactgcaagctccacctcctgggttcaagtgattttcctgcctcagcctcccgagtagctgggattacaggcacccaccgccatgcctggctaatttttgtatttttactagagacagggtttctccatgttggctaggctggtctcgaactcctgacttcaagtgatccacctgcctcagcctcccaaagtgctaggattataggcgtgagccactgcgcctggcctaggattttaagtcttaacgagcattttggttctgctgatgacaacgggaaaaagtaacatgaggggactgattggtccccttatgttatatgggagcctttttttttgagacaggatctcactgtggcccaggctggagtgcagttgtgcaatctcagctcgctgtagcctccacctcctggactcaagtggtcctcccacctcagcctcctgagtagcttcggactataggcatacaccaccacgtgcccagctaatttttgtatttttgctagagacagggtttcgccatgttgcccaggctggtcttgaactcctgacctccactgacccacccacctcagcctcccacagtgctgggcttacacacgtgagccacacagtgctgggcttacacacgtgagccaccatgctgaggagactgttttaaatgctctcttctttggtttttcagcctgagagacactctcgtaagttacatgcaaactaaagaaagtgaaattcttcctgaaatggcatctcagttcccagaagagatactgctcgccagctgtgtctcagtgtggaaaacagctgctgtgctgaaatggaatcgagaaatgagatagaattatttcctcagctatctttggatgactttggagagaagactcctctctcctcgtctgcggcgtggacttgatcatggactggtgcctttgcattcagaaggagagctgtcagcgtagcaccgaattcaagaccaaggcgtgctacctgagctgacagctttttgaaagccgagctgtttctgaaccatgtacatacatgttctgaaactttctcatcattttatgagtactgttcattgagagatgacaatgaagattagatgaaattggaaataaaccaacattgtttacattccaggagacttgtagctcagccacacacgcagtaatgacctgtgcccgttcgcctctggcactgcccacccctctttttttttttcttctaattctgtactcacaaaagagaatctcattttcttctttcttccattcccttaaattctgagtactgtacatatatttctgggttcccacgatgatgtgaaaaactaccagactgttttttgtcttctcacaaagacaagaaaaatcagggcattttgtgagtgccttaagatcaaactaacaagatctgaccctctcccctcacagtgagccactgccccacttcagagggtaagagccaaaagcctcattgtgaaaggcactggacttggaccagggacaccatcagggccttggttttctcacgcataaaatggagagtggattaatcgccaaagattcttctgatctgacattttgaaattgtgagagaaactagatgactgtaaacttggtcacaggcctggttctggcagttctttgcggacttttttctagcattatgccaaataaacatgcagtctcagtgtgctctcgcatgtatgaatatctagtcctttctgtggttctcagccaagacataaaaactaggactcagagcacatacaaaaccagttatgtttcggaaagagggaaaagagtccccgagcccggatcttgtgctgcttttctcactgacgtgttgccttttttctttacaaaatctgctttgatacttaggacctctctggactaatttctcttcctagacagctcagcacagctattgatatgttagaggcagtatccttaatattcattctaaatgagttaacgacttaacttgaaattgggcctaaggagtgagaactacaaaaatacaaaatgcttgtccaggactcagccatgcacaccttgagcagcgccggcaggaggcacggaaggaactgtgctccgttctcctcactgtcatggtgccaccagtgtctgatgaagggcagagtgacccagactgcaggcagtaactgacttcacacagtccctggcatttagtcatctgtgattgttttatcactctggactgtgcagagccacctgccaccgagatctgcattccgactgcctatgaacgggtgtgggggccgggggctggcttgctgaagtcttcaacttgcactcggagctcctttgatacctcagagctggctgtcaggtggcagctcacacccagactcactggccacacctcagcagggggggagtcgagtgtcagtctctttctgtgaaggctttttttttcctttggcctgggaatttttcccatttttatgaaggggttttaaattgtttcattttgtgtgctgtgcttcaaagccttaactgtcaaatcttgcattatcttgtttgtacagaaatatactggcctagcagaggcaaaaaaaaaaaaaatgaattttattttacttgtcacacctgtcttaataaactggagttttgctgctaaagaactcttctctctgggggcagagcttctatttatggcacatagacatcagctaggcttttgggaatcgtttgtgttctttgtggaaatgtcctttagaagcacccatgaagtagtgtgttcagactgtgcacacagaaaacaggctctgccttcacatgtgagacggtggacttttcctctggacaaaatgacagcatcctggcgactccacagtggagctgagcgccactccctgtagccgatctgggactgaaacgcttacacctctgcctcagaaggagtcccccatgccctgcctgaaatgacttcactggacacagcggggctgcagctaacggggtacaggtaggagctaactaacttcacccctgagtccacttgcggggtaagagataaacagtaacccttccaggagcccactgacgttggagtgctaaaaatgccccttcagggggaaaactgcattttctcttccaaaaaggaaaggttcttccaggcgagaaacctgtggtctagaaccacagcaagaagaggaggcatgctggcctgcaccggaagactcactttgtctgccctgcgccagcctcacctcaccctgcagttcccgtttccgccatggatgcctcatcaccaaccctgaccttccccctcccaaccctttattcatcctcactcccactcatacccgcctccctggacagttccctgctgcagagttctttctgctttcagccctaccttggtggtgatttacctgaaaatcttcacaactgatcattatctccttctctttgagacctgactgaaaaaattaggtgtgcacacctgtaatcccagctacctgggaggctgaggtatgaggattgcttgagcctgggagtttgaggctgcagtgagctatgattgcaccactgcactccaacctgggtgacagagtgagaccctgtctcaaaaaaaaataaaataaggaccttattgtgtgtgcaaattatttgcctttcatgaatagttatgagactttgtgcatgtgttaaccgagacggccctgagctatttcagttactcctgtatgttcaggcaattccaatttagaaacaaacttccagtgataaatattgggaagaaaatgtcagctcagggccaagtaggtaaagccacccaagtctagccatgcacacaggcactagtgtgctgaaggaaaacacctctgatttgatacataaagtgtgaaggttgcataactggggaggtggctggagaaaacctgagcctcgagctgagtaacaatccaagccatgattagcatttatattgcattctgcattattctcatcctatcacgttcattaagttcaaccattaccattacgaatcccgtttccagctggaaaaacaagcgccaggaaagtgcatttcccccccaccccccccccccaaccagagcaactttggtcagaagtcacacctaatcaccctctctgcaggatatgctggggatagcccttttgaggaggtgggggtgtatgcgaaagcaacctggggccaaagcagggggaagcaggagagactggaggggccctgggtccagcaagtgctccaccaggctgcccctgctcaggtgctccacagcccataaaaaacgccttcagccctgctgtgcttcccctcacacctaaacttactataagggtcctaccttccccagtattccttcatgatcactgctacctgtgccctgaagcgcaacagaacctcaacccagaggacagccacttcctcagaacccacgatctttgccccatcgccacaggtccatgagtgactcctaattaccaaatccaagggctccttcaccctgaccactctggaacccaacaaagctgacacacagcccagcccagacaggcctgaatgtgggtcctggctctcccatttgccagttctacagccatgggcaagtggctcgacctctctaagcttcagtttcctcgtctgtgaaatatctgtcagtgctcttaagggaggagaccaccccacatattgtcttacgcccaatttctgcctccaaagagagaagtaaaaactaaaaggcagaaatgaaatccacaagcagacagcctgcaccacaccctgggcctggtagttaaagatcgacgcctgacctaatcagtgatgctatctatagattacagacattatatagaaaagcaccgtgaaaatccctgtcctgttctgttccgttctaattacgggtgcatgcagcccccagtcacgtaccccctgcttgctcaatcaatcacgaccctctcacgcagaccccttaagagttgtgagcccttaaaagggacaggaattgctcactcggggagctcagttgttggagacatgagtcttgccgaagcgcccggctgaataaagcccttctttaactcgtgtctgaggggttttctctgcagcttgtcctgctacatttcttggttccctgaccaggaatctaggtgattaatggatggttgaggcagcccctcagacggcttaggcctgccctgtggagcatccctgtggaggactccagccagcttgagcgacatggatcctgagagcgctctcaggcaggcaattgccccagtggaatgcctggccagagcagtgtgtagcaggcccccgaggaggatcaacgcagtggctgaacaccgggaaggaactgccacttggagtccagacatctgaaacttggtaagactggtctttggaacttgcccactccatttgaggggaagcgtggcctgatcacccacggcgtgcctgtactggcactctggtttttgtttttgacttgacttggattgcttgatactttggttttggttttgacctgacttggatatcctgatactctgattttggttttgattttggtttggtgtaaactgtaaaagtgtgtgtgtgccctttttacctgttctttgttttgtggtatgcgtgtagggtgagcgtaatgttttgtcttgaagaagcatgggtcaagcacaaagtaagaccaccccactaggaactatgctgaaaaatttcaggaaaggatttaagggagactatggagtactatgacaccaggaaaacttaaaactttgtgtaagatagactggccagcattagaggtaggttggccatcagagtgaagcctggacaggtcccttgtttcaaaggtatggcacaaggtaacctgtaagccagggtacccacaccagttcccgtacacagacacttggttacagctggttttagactccccacccgcccgccccaacagtggttgagagaacagcagcataagtggctggcagaggcaaggaaagaccagcagagagagaaagaggaagagacagacaaagagggagtcagagagagagagagaaagagacagaggcaaaaggaaagtcaaagagaaagagacagaaaatcaagaggaaaaaaagaaaaaaagagatatatatacaagtagttagaaacaacaacaacactgtaccctattcctttaaaagccaagataaatttaaaacctataattgataattgaaagtattctctgtaaccctgtaacactccaataccactttgttgtcagtgtaaacaagggcatatcccgaaagcactgaggccttcccatcaaaaatccttaacccagtaacccgtggatggctcaaatgcattcaatctgtagctgcaactgctttgctaacagaaaaaagtaaaaaaataacttttacaggaaacctcattgtgagcacacctcaccagttcagaagtagcctaaggaaaaaaaaaaaaggatgatttaactttaactactgaaaattcccttaacccagcaggtttcctaacaggggatctaaatcttaattaccgtacaaaggccctaccatacctaggaggaactcccttcaggaaaggatgatctatggttcctcccaggtaattaaaggaaaaaaaaaaagccatctatacgaattctaagttaattttgacaaaacgaggtcttactaatagcaaaggataattaaaatcccaagcttacaaggttttcaacaaaagtaaagtttgctaaaagttaacagtgtaacatgtattatagtaatttctgatcttgtggcctcagacagtctagtccacagacataaaagaagttcgctttggaaaagaatggttatcatcttcaggaaaaaaaaaaagaaggggcagaatttacataaaaagagtgttatatggtaaattcttgtcctgaaataaattaactggttgtttaaagaaagaaatgtttgtaataagtcagaaagttgaggcatgtcgaagaattgtctgcgaaagtcgtgaaagagaaaaatgttataaaaaattatgcaagaaatgttgtataatttaaaagtaactaggcctcctaaatgtaaaactattgaaagaaaaaaaaaacagtttatgtgcaagtgtcaggcctctgagcccaagctaagccatcatatccccagggacctgcacgtatacatccagatggcctgaagcaactgaagatccacaaaggaagtgaaaatagccttaactgatgacattccaccattgtgatttgtttctgccccatcctaactgatcaatgtactttgtaatctctcccacccttaagaaggttcttcgtaattctttgtaatcccacccttgagaatgtactttgtgagatccaccccctgcctgcaaaacattgctcctaactccaccgcctatcccaaacctacaagaactaatgataatcccaccacactttgctgactctctttttggactcagcccgcctgcacccaggtgaaataaacagccttgttgctcacacaaagcctgtttggtggtctcttcacacggatgcgtgtgacgtgcgtgacatttggtaccaaagatccgggacgggagtactccttacagagaccggtcccctgtcctcatcctcactccatgaggagatccacgtacaacctcgggttctcagaccaaccagcccaaggaacatctcatgaatttcaaatcgggtaagtggtcttttcactctcttctccagcctctctcgctacccttcagtctccctgtccttccaattccagttctttttcctctctagtagagacaaaggagacatattttatccgtggacccaaaactccggcgccagtcacggactcggcaagacagtcttcccctggtgtttaatgactgcagggacgcctgcctgattattcacccacactccactggtgtctaatcactgtggggatgcctgccttggtcattcacccacattcccttggtggcaagtcaattgcggggacaacctgctttggctgctcacccacattgcagcccacggctgctccctaccccccttctccgtgtctctacccttctctttaaactggcctccttcactgtgggcaacctttcaccctccattcctccttcttctcccttagcctgtgttctcaagaacttaaaacctcttcaactctcacttgacctaaaatctaagcatcttattttcttctgcaacaccgcttggccccagtacgaactcgacaatggttctaaatggccagaaaatggcacttttgatttctccatcctgcaagacctagataatttttgtcgaaaaatgggcaaatagtctgaggtgccttacgtccaggcatttttcagacttcgttccctccctagtctctgttcccactgtgactcatcccaaatcctcctcctttccctcccgcctgtcccttcagtcccaacctcgagcgttgctgagtcttgtgaatcttccttttctgctgacccatctgacccctcacctcctccccaggctgctcctcctcagctcgctccccgccaggctgatcaggctccagctcttcttcagcctctgctccccaccctataacccttctattacctccctcccacacccggtccggtttacagtttctttctgcgaccagctctcccccatctgcccaacaatttcctcatagagaggtggctggagctgaaggcatatgtcagggtacatgtgcctttttctctatcagacctttcccaaatcagccagcgtttaggctctttctcatcagaccccactaaatacatacaggaattccgatatctaactctgtcctacagtttaacctggagtgactgaaatgtcatcctaacttctaccctctccccagataaatgggaaagagttttttctctagcccaatctcacactgacaaccaccggcttcacgagccagacctccaggagggcatcagagcagttccccgagaagatccccagtggaactaccaggcagattccccaggtatagctacgcgagattacatggtttcctgcctagttgaagggcttaaaaaggcagcttacaaagctgttaattatgacaaacaagaaactacccgaggtgaagatgaaaacccagcccagttcatggcccacttggcagtaacccttagacgctttaccgccctagacccagaggggccaggaggccgccttattcttaatatgcattttatcacccagtcagctcctgatgttagaaaaaagattcaaaaactggaatccagccctcataccccacaacaggaattaatcaacctcaccttcaaggtgtacaataataggaggtagccagacagcaacgcatttctgagttacagctactcgcctctgctgtaagacagcccacaaccacgtctccagcatacaagaacttcagaacatccaagccacagctcccaggggctccttcaaaacatcctcgtgggccttgcttcaaatgccaaaagcctggccactgggccaaggaatgcccgcagcctgggattcctcctaagctgtgccctgtctgtgcgcgcccccactggaggtcggactgtccgactcacatcgccgctgctcctaaagcacctggagcccaaacccaacgttccttggccaactccttcccagatctcctcggcttagtggctgaagactgacgctgcccatcgcctcgggagcccctggaccatcacagacactttgggtaactcttacagtggaggataagtctgtccctttcttaatcaatacagaggctacccactccacattaacctttttttcaagggcctgtttcccttgcctccgtaactgttgtgggtattggcggccaggcttctaaacctcttaaattccccaactctggtgccaacttggacaacattcttttatgcacccctttttagttatccccacctgcccagatcccttactagattgagacattttaactaaattatctgcttccctgactattcctagcctacaaccacacctcattgccacccttttctccagttcaaagccgccttcacaccctccccttggatctccccaccttaatccacaagtataggacacctctactcccaccttggcaaccaatcatgcaccccttaccatcccattaaaacctaatcactcttaccccactcaatgccaatatcccatcccacagcacactttaaaaggattaaagcctgttatcactcgcctgttatagcatggccttttaaaacccataaacactccttataattcccccattttacctgttccaaaaactggacaagccttacaggttaatttcagaatctgcaccttatcaaccaaattgtcttgcctatccaccctgtggcgccaaagccatatactcttctatcctcaatacctccctccagaacccctctacatatattattatgtagatatgtacatatctacatatgtacataatctacataacccattctgttctggatctcaaacatgctttctttactattcctttgcacccttcatcccagcctctcttcattttcacttggactgacccggacacccatcaggctcagcaaattacctgggctgtactgccacaaggcttcacggacagccccccccccccccgttacttcagtcaagcccaaatttcttcctcatcctttacctatctcgacttaattcttcatgaaaacacagtgctctccctgctgatcgtgtctagctaatctcccaaaccccgaccccttctacaaagcaacagctcctttccttcctaggcatggttagatactccgcctttggatacctagctttaccatcctgactaaaccatcatataaactcacaaaagcaaacccagctgaccccacagatcctaaatcctttcgccactcctctttccgttccctgaaaacagccctagaagctgctcccacactagctctccctaactcatcccaacactttttcattacatacagccaaagtgcagggttgtgcagtcagaattcttacacaagagccaggaacggcccctgcagcccttctgtccaaacaacttgaccttactgttttaggctagcccccacattattcctgataccacacctgaccccccatgactgtatctctctaatccacctagcatttactcaatttccccatatttccttctttcctgttcctcaccctgatcacacttggtttattgatggcagttccaccaggcctaatcgccactcaccagcaaaggcaggctatgctatagtaacttccacacctatcattgaggctaccactctgcccccctccactacctctcagcaagccaaactcattgccttaactcaagccctcactcttgcagaaggagtacgtgtcaatatttatactgactctatgccttccatagagtcagcatgcaccaccatgctgttatatgggcagagagaggtttcctcactatgtaagggtcctccatcattaatgcctctttaataaaaattcttctcaaggtcgctttacttccaaaggaatctggagtcatttactgcaagagccatcaaaaggcatcagatcccatcattcagggcaacacttatgctgataagttagctaaagaagcagcttagttttccaacttctgtccctcacggccagtttttctccttctcatcggtcactcctacctactctcccactgaaacttccacctatcaatctcttcccacacaatgtaaatggttcttagacaaaggaaaatatctccttccagcctcacaggcccattctattctatcatcatttcacaacctcttccatgtaggttacaagccgctagcctgtctcttagaacctctcatttcctttccatcgtggaaatctatcctcaaggaaatcacttctcagtgttccatctgctattctactactcctcaaggattgttcaggccccctccctccctacacatcaagcgcggggatttgcccctgcccaggaccggcaaattgactttactcacaggccccgagtcaggaaactaaaatacctcttggtctggatagatgctttcactggatgcgtagaggcctttcccacagggtctgggaaggccaccgcagtcatttcttctcttctgtcagacataattcctcggtttggccttcccacctctatacagtctgataacggaccggcctttattagtcaaatcacccaagcagtttctcaggctcttggtattcagtggaaccttcatatcccttaccatctcaatcttcaggaaaggtagaagggactaatggtcttttacagacacacctcaccaagctcagcctccagcttaaaaaggactggacagtacttctacctcttgcccttctcagaattagagcctgtcctcaagaagctacacggtacagtccatttaaacttttatgtggacgcactttcttgctcagccccaacctcatcccagacaccagccctctaggcaactatcttccagtctttcagcaggctagacaggaaattcgccaggctgctaatcttctcttgcctactccagattcccagccacatgaagacaccctagctggatggtcagttcttgttaataatctgacccctcaaactctacaacctcgatggaccggaccctacttaaacatctatagtacccccaaccaccatctgcctgcagaaccctccccactgggttcaccgttccagaataaagctgtgtccgtcagacagccagtccgatatctcctcttcctcctggaagtcgcaagtactctcccctacttcccttaaactcactcgcatttctgaagaacaataacccttatgagcctaatacatcccttcattctattaggtctatccatccttaccctactcttcgcaacagggctttacgcagtcacccccactacttggactgtgccccaaaaacctgtcatccctactatcttctgtctagtcatactcctattcaccattctcaactactcataaatgacctgctcttgtttacactgccagtttacattgtttctccaagacatcacagctgatatctcctggtgatatccccaaaccgccactcttgactcctgcttggagtggatagatgatctttggtggcagggcaccctccaacacttccaccctgatgaagttctattctttacttttatattcactcttattctcattcccattcttatgccactctctacctctccccagttacctccagcatactatcaatctcacccactctctcctcactgcctccaatccttttctagcaaagaattgttggctacgcgtttccctttcctcctgcttttacacagccatccctgctctacaggctgactgggctacctctcccgtctccctgcaactcagaacctcctttaataaccctcatctttacccgcctgaggaacttctttattttctagacagatttggtgagaactccccagacatttcacaccaacgagctgccacacttctccgcatctacttacggcatctttctccttatgtcaattccactcctcccatatttggaccccaaccacacaaacaactatccctgttgccgtttctttatgcatctcccgacaacagcctgctggaatccctttaggcaaccttccaccgtccaaatgttcctttactctttgtctccagaacccagccacacacattaccaaacagatgggagcattccaacttcgcattactgacaagccctctatcattattgacaaactaaaaaacattggcagtcactattgtttaggaagacacctaccctgcatctcaccccatccttggctaccaccctcccctgctcgtctgaatctcctcctagcccctcctcttgcttgcttataccctgccccatgaatagcagcgaaaggttacttgtagacactatgcgctttctcatacaccatgaaaaccaaacccctccctctacgcagttgcaccatcaatccccattacaacctctaacggctgctgcccttgctggatcgctaggattctggatgcaggattcctctttcagtacaccctctcaccttttcactttacatttccagttctgcctgacacaaggtctcttctttttatgtggctcttccacctacatgtgcctacctgccaaatggatgggcacatgtactctagtcttccttacctccaaaatccagtttgcagatgggaacgaacaactgcctgtccccctcatgacatcaacacaacaaaaaagagtcatcccactaatccctttacttattggtctaggactttctgcctccagtattgcacttggaactggaatagcaggcatctcaacctctgtcacaacagtccgcagcctctctaatgacttctctgctagcactacagatagatcacaaactttatctgttctccaagcccaggttaactctttagctgcagttgtcctccagaacggccaaggccgcgatttactcactgctgaaaaaggaggactctgtatatttttaaatgaagagtgttgtttttacctaaatcaatctggcctgctatatgacaacataaaaaaactcaaggatagagcccaaaagctcgccaaccaagcaaacaataacattgaacccccttggacactctctaattggacgtcctgggtactcccaattcttagtcctttaatacctatttttctccttcttttattcggaccttgtgtctttcgtttagtttctcaattcatataaaaccgcatccaggccatcatcagtaattctatatgacaaatgctccttctaacaaccccaaaatctttcttcagttgaatctctcccactgtaggttcccacaccgcccctgatcccgctcgaagcagccttgagaaacatcgcccattatctctccataccacccccaaaatttgtcactgctccaacacttcaccactattttgttttgcttttcttattaatataagaagacaggaatgtcagccctctgagcccaagctaagccatcatatcccgtgacctgcatatacatccagatggcctgaagcaactgaagatccacaaaggaagtgaaaatagccttaactgatgacattccaccattgtgatttgtttctgccccatcctaactgatcaatgtactttgtaatctctcccacccttaagaaggttctttgtaattctccccacccttgagagtgtactttgtgagatccaccccctgccggcaaaacattgctcctaacccaaccgcctaccccaaacctgtaagaactaatgataatccaccaccctttgctgactcttttcagaatcagcccgcctgcacccaggtgaaataaacagccttgttgctcacacaaagcctgtttggtgggcttttcacacggaggcgctaacacaaggtgtataagaaaagtaaatatacctttggtaaaaggattataagaaggcataagaatgtaaatttttacctagattaaaaggttaaaaaaattgttttgaaggtttaagcaagttttaaaacattaattataaaaaaattctgtgtgtaaacgtattagctaaagttaaaggggtatcatccagtttttctgtgaactggacattaaagtaaaaacacaatgggtttttcttaaagcactaacttgctctttaacaaagattataaaaggttaaaaagagtctataaaaatcttaccttacggtctgacattaaaaattgaataaatatgtatacaaagttttattaaaactaagtttaacattaatagcacactaatataaaggtgaaatttagcttatctggtataaaaatcatacagaaagcattattaaatataaaacagtgtttggctttctttggtccaaaaactaataaaaataggtggtaaaggaaatttctcagtaaaaaggcaccaaagcctataaagtccactcttgatgtccccacatttgaaacaaaaaatcaatttcttagaaattatatacttggtttgtcttccactttcctttccctcaaaactaaaagccttttagcacaggtgccagccctagaatttccagtaaaccagcaccagcctgaagatcaccttcttatcaaagggaggaaagaaaacaaatttttcaaaggaaaagtttttcttatcaaaggaaagaaagaaaacaaagggaggaaagaaaacaagccagcctaggaaggacccgaccttgtgctgctaaccaccgagactgctgtccctacagtggaaaagggatggactcatcacacccgagtcaaagctccaccccctccggagtcgtgggccccagtccaaggggaaaaccctaccaaactaaagctaagaaatatttaactcttttatctattctattactctttcttctttcctcgctctattgctgaccatctggttattaacacaaccaaatcaatttcacctcaaactattgcatttaatgcttgtcttgttataccctgtggggacttgccaagtcgaagacagctctctacttcagaaaagtacttctgtccctcctgactctcctcagactgggcattagtaaattaggaccatttaatccgggggaatttcaataaagactccagtgtcaaccaggagtcttgctccccaatgtagagcttttatgccgtagttggtccaacattctgtggaccactaaagagcaagaatggactgccccaaccagtttttgtaatttcccaaaatcatacattcattttactagaagttcatattagttaaagacttaaaacaaactttggcaattaagacagcataccaagatgcaaatgcctggttgaaatggatcaaatattccatccgcacgttaaacaaaagcaactgttacgcttgtgcacatggcaggccagaggtcctgattgtcccctttccactaaggtggtcctccagtcgaccaggtgtggctgcatggtagctcttctccaggattctacagcctggagtaataagttgtgccaagctctctctgctgtatccgaaagtctggcgccttgcgggtcagcccccgagggccatcgagccgccgtctcccaatactaagttcacttcgtgtctctcatgacagggaggaaacttagcattccttggaaacctgaagggatgcagtgagcttaaaaattttcaagagcctatcaatcagccagcccttgttcatccctgagtggatgtgagcggatgtgtggtggtattgtggtggacctttactgggcactctgccgaataactggagtggcgcttgtactttagtccgattggctatccctttcaccctggcattccatcaaccagagggaggaaaaataagacatcgtaaagcaagagaagccccttatgggtctttcgactctcatttccatttagacgcaattggagtcccacggggaatactagatcaatttaaaacttgaaatcaaatagcggcaggatttgagtcaatattttggtagatgacagttaataaaaatgtaaattggataaactacatctattacaacaaacagcaacaagcttttcatgagttaaaagaaaaacgtaggccccagccctggggctatcagacctgacaaaaccctttacaccctatgtgtcagaaagagaaaaaatgcagttggagttttaacccagactgtgggaccctggctaaggccagtggcctatctctcaaaacaactagacggggtttccaaagcctggcccccgtgtctaagggccctggcagcaacggccctgttagcacaagaagcagataaactaacccttggacaaaacctgaatataaaggccccccacgctgtggtaactttaatgactaccaaaggtcatcactggttaacaaatgctagattaaccaagtaccaaagcttgctacgtgaaaatccccacataaccactgcagtttgcaacacgctaaaccccgccaccttgctcctgatatgagagagcccagttgaacataactgtgtagaggtgttggactcagtttattctagcaggcgcaacctccgagaccatccttgaacatcagtaggctgtgagtggtacgtggacggaagcagcttcgccagcccctgcaaagtgactctgaggaagacgacaagccctgctccagtcacaactggaagctgactggtccacacacggccgaagcatgagaaaactcatcgtgggactcattttccttaaaatttggacttgtacagtaaggacttcaactgaccttcctcagactgaggactgttcccagtgtatacatcaagtcactgaggtaggacaaaaagttgccacagtcctattattttatgattattgtaagtgtaccaggactctaaaaaaaaaaaaagtttgtataatgctattctatgcaaggtatgtagcccaagaaatgaccaacctgatgtgtgttatgacctgagtctcccatgaccacagcttttgaaataagattaaggactgaggactggtagggactcataaacgatacgagtaaagtgttagccaaaatgaaagaaaaaggggtgcccaaacaagtcactttaaagtttgatgcctgtgctgtcattaatagtaataagttaaaaatagaatgtggttcccttaattagaaaagaggccatatgacaaaaaataagtacatttgtcataaattaaaactgtgtggaaataaatgtaaatactggtcttgtgtcatttaggctacttaaataaaaaataaaaaggatcctgtccaccttcaaaaaggaaaaagtggcccttcctgtaccagtggtcagtgtaaccccttagaactagtaataaccaacccccttgatcctcgctggaaaaaaggggagcatgtaaccctaggaatcaatggggctgaactggatccttgagtaaatatcatggtttgaggagaaatttataaacgctctcctgagacagtatttcaaaccttctatgatcaactgaatgtgcctgcaccagaaattccaggaaaaacaagacatttgtttttgcaattagccgagcatgtggcccagtctctcaatgtcacttcatgttatgtgtgtggacgaactgtaatgggagatcaatggccacgggaagcccgagaattagtacctacagacccagttcctgatgaattcccggctcaaaagaatcaccctgataacttctgggtcctaaaagcctcaatcattagacaatactgtatatagcaagagtggggaaggacttcacctttcctgtgggaagactcagctgcttaggcaaaaactgtataatactactacaaaaacagccacctagtggagttcaaaccacactaagaaaaatccatttagtaaattcccaaagttgcaaactgtgtgaacccacccggagtcccacagggactggacagcccccactggattatactggatatgtaggcatagagtttacaccaaattacccgaccagtgggcaggtagtcatgttattggcactattaaaccatctttcttcctactgcccataaagacaggcgaactcctgggcttccctgtctgtgcttcccgcaaaaagagaagcatagctataaaaaattcaaaagataatacatggccccctgaaagaatcatacaatattatgggcctggtacttaggcacaagatggctcctagggatacccgacccccatttacatgctcaaccgaatcatacggttacaagctgtcttagaaataatcactaataagaccggcagagccttgactattctggcctggcaagaaactcagatgagaaatgctatctatcaaaatagattggctctcgactacttgctagcagctgaaggagaggtctgtaaaaaatttaaccttactaattgctgtctacacatagatgatcgagggcaattagttgaagacacagttagaaatatgacaaaactggcacatgtgcccgtgcaagtgtggcatggatttggtcctggggccatgtttggaaaatggttcccagcactaaaaagatttaaaactcttatattaggagttacaatagcaatagaaacctgcgttctgctcccttgtttgctacccatacttcttcaaatgataaaaagcttcatcgctaccttagttcaccaaaatgcttcagcacaactgtactatatgaatcactatcgatctgtcttgcaagaaaacataggtagtaaaaataaaagtgacaactcccactactgagtgagattctcagagagggagaataagggagaccacccctcatattgttttacgcccaatttctgcctccaaagagagaagtaaaaactaaaaggcagaaatgaaatccacaagcagacagcctgcaccacaccctgggcctggtagttaaagatcgacgcctgacctaatcagtgatgctatctatagattacagacgttatatagaaaagcaccgtgaaaatccctgtcctgttctgttccgttctaattacgggtgcatgcagcccccagtcacgtaccccctgcttgctcaatcaatcacgaccctctcacgcagacccctgaagagttgtgagcccttaaaagggacaggaattgctcactcggggagctcggttgttggagacgtgagtcttgccgaagctcccagctgaataaagcccttctttaactcggtgtctgaggggttttgtctgcggcttgtcctgctacactctggtgggaaagacaccgcagcaggggagcagggtgcgcagggtgcagtgggtgacgctcattcgctgaaaactgaccctgctttcaaagccttgtcagttcccaaagctgtatgaagcctttcctgagcctcaacctctagagtctaatttcatcctctgtattttcccctttgttagtccaaactgcgtcattttgtaagcccctttccattttgtagaccttggtcaaagtgaaacattccacgggggttcgagccatgagaaacagcctgcctcttaacatattctgctgggacaaagcgccaggaacaccacattctgccggaaccacctcatcctgggaacacgttaacatcttcccggacagcaagccatactgcctagatccctcctgcccaggcctatgagtaccccagcctgtaatcgctggtgggctctggcattaagctggcccccgacaggtgtttgcaatacacctgtgttgctgtagagccgcccgcgcgccggcaatctcactgtgcgtcattctttaaccttcaccttcccttcaaaacctaacacccttgacgtttatattcaggctattatatatacatacacacatacacccttctgaatcctcccaggagaatataaaaccatgggttaaactgctacacttcagcttcagtggctgcctttcagtgcttcaaatacaccaacctctttcccaccccgggacctgcacgagaaagctgctccactcacccgccgtgctctttcactcacccttcaggtgtcttcaatatcgcctctcaggcctttcccaaccaccggtttaaagtcggctccccacaaataaatacatattctccctcacagtacttcgcacaacacctggcacagcgagagcactgaaccaacactcattcaatgaggaacacgaggtaagaaccaagaccccccaaggtcgccgtactttgtctggtaggagaagctttctgcccagcaaggtccgacccagatgaaaccccgtccaagtctgcagcacccccgtgagtccagcccgctaaactgtgaagaatttaaatacacgacacctgccctcaaaagcttgagggcacccctgagctgccatcgaggtgggggcgtcaacgacaggcgctcagtaagtgctcctgaggcaactgccgggctgtcctggacctggtgaatcctttcggggttcagcaaaggcggacgctgaccgggccaaggagtgggacctgcagtgctggaccacccttttccaagcgcagaagtgccgtgcccgccggctctcaacagggcaagaggcccctctcgccgtgcagagcgcagcgcttgcggcggggacagcagaggcgggacgggcgtcacggagttcccgggtcctcgcgcggtcacttacctggcctcagctatccgctgaaaaaggggcggacggcctcccgggatccgagccgatatcgcgcgcggcgccgcggggcaacctgaagccgtgtgcgtgcgtgtgcgttcacgcaggggctcacccagcggccacgggcttctgaagacccgggtgggaagtgcggcccgggaaagcgcaagcgtctccatggcaacgagggcggacggcgtcagagcgagtcgcttccggaagtgacgtgcggaaggggtgcccgggacgaagccatggccctggaggcggcgggagggccgccggaggaaacgctgtcactgtggaaacggtaatgctgtcaggcgacgcgcaggaggcgggggccgaggccgggcggcccttcgcggaccctccgagctcatagtcttcaggctgtggaatcggagctgccaccgcccgagactccaaagcaaagcccagtttccggcgcggaagcggagggatctcaggaattgtagtccgcggggtgggcgcggttctcgcttccggccagtttgtctggcctgcgcttgcgcgggtctccgccgcctgggctcctagggactgtggcctcggcggtatgtcccttgctttcccttgaagcgggagaagacccggcagaggcgctctgtccgctgcagccgcgcgggtggaggaggcagagtctgaggtgtgaccccgaccaagtttgacgcttctgtcctcctagggagcaagctcggctgaaggcccacgtcgtagaccgggacaccgaggcgtggcagcgagaccccgccttctcgggtctgcagagggtcgggggcgttgacgtgtccttcgtgaaaggggacagtgtccgcgcttgtgcttccctggtggtgctcagcttccctgagctcgaggtaacctgggaggacgccgagctcgaggcgggcccctcggtgggctcgggcgtgcggtctccgggacagggagcagtgcaagcgtagaacccggcttctcgttttgtaggatgtcattaatagtctggggagttggccgggcgcggtggctcacgcctgcaatcccagcactttgggaggctgaggcgggggaatcacctgaggtcgggagttcgagaccagcctgaccaacatggagaaacccggtctctactaaaaatacaaaattagacgggtgtggtggcatatacctgtaatcccagctactcggaaggctgaggcgggagaatcgcttgaacccgggaggcggaggttgcggtgagccaacatcacgccattgcactccagcctcggcaacaagagcgaaactccatctcaaaaaaaaaaaaaaaaaaaaaaagtctggggagtcttggaagggaaaaaaaggcaaaaattaagggaattctgtgactattaagaatcagctcatgagctttatcttcaagtctgattgttatcttgggttcttcatctcagtgacctgtccaccacgctcccagttgcccaagctggagatctgcatcctcctgggcccctccgttcctctcgcgtccagttgcacactagctcgcttttattctgcctcttaaatgtcgctggaatctgtccccttgtctgtttcccctctgctccttccctggctgtgccaccatcactcctgtgggttcctgagcagcattttcatgggtgccctggctcaaatgttcctcctcagtggtttcttttccatactgccagcagaccaattttcctaaaaagcaagtattttcctcaaaagcaacaagtcccctccctccctccctccctcccttccttccttccttccttcctcccttccttcctctctctgtctctctttccttcctttccccttcccccactctgtgcccaggctgaagtgcagtggcataatcttggctcactgtcaagatctgatctcaacctcctggactcaagtgatcctcccaccttagcctgagtagctaggaccacaggtgtgagccactacacccggcttatttttttattttttgtagagacaggatctcactatgttgcccagggtggtctccagctcctgggctcaagggatcctcctaccttggcctccccaagtgctgagattacaggtgggaaccaccacacccagcccacaagtcctcttagaacattgaagtgcccttctcatgacctcatggtgaataaagttcactctggttggcatggcttcaaggcccgtcatgacctgtcccctgcgtaatttaatatgacgctggaggctcagccctcaccactattctcagttcttcccacctcctacagcccactgtgagtccctcacgtgtttgctacgctgtatttggcggcctgacctttgcagtaatgtttcttctggaagggtttccatctggctaactactactcatctctttgggctcagtttagacatgacgtcctccactaagctccctctcatcccacaagacgaggacttgtccctcagcaccatgtcttagtccgtttgggctgctgtaatagaataccttagactgggtggcctacccacagcaggaatttatttctcacagttctggaggctggaggctcaagatcagggtgccagcgcaatcaggttgtggtgacggcgctctttcaggttgcacagggccagcttcttaaccgtgttctcacatggtgatccactcacctccctagaggccccacctcgtaataccatcacctatgggttataatttcaacataggaatttggggaggacaccagcatttagaccgtagcaaccctctgcttcctcttgtcttgctgggatggaactggcctgtcttccctactggaatataaactccatgatggtagaaaccatgttgctttgcccaccatggatagcatgaggaagacgctggactcttccttcaagagatacgtgtgtgaatggacagtgggctcatgattcacataagagtcaacagctccggaagcctcttggcgtcactcgcattgctcctctgctgactcccgaaggtgacaaacgtcttcctgcttccatggctttgtgctttacttgggaggcccttttcagtccaaatcaagcaaaaatgtactgagtgcctactgtgtgctaagattgggatattcagcagcccctactctaagaggtcccctggccattgtgtaggctagcatagggagtggggacacagtcttagggtcctgactactcatgctcacacccaactctgccactccccactttgccctctaggcctctgtctccttttttctgacttgaggatgatagtggtattaatatccagctcacagaattgtgatgagcagtacatgaaatgcatggaaagcagttaacacagcattcccttccccctccaacttctcctggctgcaaattaatcacctcatctgcatcctgggcctcttttgaatgcacatgctgttagagcgcttctcacattgtattaaagttagtcatttatgattccatttttcccactgactgtaggttctcaagagtagggtgtaccatatttcttttacaaccccagcaccaagcaaagcacctgctacttcgtcggtattcattgttccggctatgaaagcttagactaggaaaggatcttggaacagtctggtccactggttcctgaatgcccgaccgtggacctgcaggagcagaatcacccagaagtgtgttgagaaacagattccgtaggcacatccacagagacagaaagtggatccttgggccttggagttggggtgggatggatgggaagtgactgctgatgaggatgaggtttatttaggggttaaggaaaatgttctaaagttagattgtagtgatattgcacaactctgtaaataccaaaaccatcgcattatatgttttaaacaagtgaactttatggtatgttaattgtatctcagtaaacctgttaggaaaaaaaacaggccgggcgcagtggttcatgcctgtaatcccagcactttgggaggctgaggcggctggatcacgaggtcaggcgatcgagaccatcctggctaacacggtgaaaccctgtgtctactaaaaatacaaaaaaaatcagccgggcatggtggcgggcacctgtagtcccagctactcgggaggctgaggcaggagaatggcgtgaacctgggaggcggagcttgcagtgagccgagatcgcgtcagtgcactccagcctgagcaacagagcaggactctgtcaaaaaaaaaaaaaaaaaaacagattccagagccctaccccacttactgggggaaaaactctcccagagtatagcataagaatctgctttttaaaataagctttcctgtgattctgaagcagagctgggctggagaaccactggcctgcttttcccaccgtgaagaacactgtccttagcatccctgacaaacgatggcggagcccgttctgtgccagatgctgagccatggctggtgtgtgctgctccgcaggcctctggcggagcccattccatgccagatgctgagcgatggctggtgtgtgctgctccacaggcctggtggagcctgttgtgtgctggacgctgagcaatggctagtgtgttctgctccgcagggagctgactcctacttgtctgtgactcccatcgatcagttctgccttcaggtagcaaaacagaacggatcttccctgccttctgcttgtcagcccttctgctgctggaaacagctgcctgctccttgaccacactgtcccaagaggctgcgatgacgtccagcttcttcactggtcagtggccctctggtcatgccctccgttcacacaatccatctttccgtctgcactcagaatcaaatgcaggaacttggatgtggtctacccaagtccctagacctaactgtcacccacgccatttcagtcggtgtagctggaaacactggtagcttttgaggggcaccaggtcactggcttatgttgagattgctggtcatccagacctgccccctacgctaatcatacagtgatttttcttttcccagatttttaatttgaaaatgtacatacatccccccaaattggaaaaggatacgttggacacctgtattccttctacttaggttcagctgttgctgctctggaatattctctctcgcgcacatgcgctctttgtgtgcgtgtgtaccgtacatcccagcgactgtgacagctcagaagacatcagcaggcctgtcctgagaatgacattctcctccacagccacagtgtcattatcatactgattacacatcatagtcatcccataatgtcacctgaatgataacattatgggagagattcagatgtaagcagccacgcccctcctgtgggaactcaggccacacttgaattccacatgtcactgtgcaaagtgacttttactctgtggggatgtcagtgatccagcctgctggcttctctgtgaacccaaattctgttatcagaatggaccctccccactttgggtcatgggcagatttgatcagtttccccattgagtcattgatgaagatgttgtgagaatgatccccaaccctctgtgctaatacagagcactccgtctgctttggtgtgtttaattattgatccagccacaagtgaggagtggaagttgtgatttgaaagctgtcaccaagagatttgggggattcagtaacaaaactgcaggaaggtagacaggtctgcagaatgtggacatagtgggaaacgtcttcacattaagggcagtgtgactaaggaaaacacaaggttaggagactcaggcctgccatgttgtgctctaaactgcagcctctgcctcctgggttcaagcagttctcctgcctcagcctcccgagtagctgggattacaggcatgcgccaccacgcccagataattttgtatttttagtaaacacggggtttctccatgttggtcaggctggtcttgaactcccaacctcaggtgatcgtccgcctcggcctcccaaagtgctgggattacaggcgtgagccaccacgcctggccaacactgtgtcttctttaagcctccaacaacccatggaggggtggggtggggcatcggcttcaatacacaaaggaggagacaccaggaaagcaaggggcaggcagaggtgatgcagccagcagccttagccttgcttctgatgaagaccaggtcctggggggctcccgcggacctgatcccagggaatcctcctatggaccaggtcccggaggctcctcctatggactagattccagggaatccttctacagtctaggcttcaggggctcatcctatgaactagatcccggggaatcttcctatggaccgggtcccggggaatcctcatacagaccagatcccggggaatcctcctatggaccaggtcctgggggctcctcatacagaccagataccagggaatcctcctatggaccaggtcccaggggctcctactatacacatcaggtctgggagttggggctcctccagtggaccgggtccggggtgggggttctcatatggaccgggtcccagggggctgctgctatggaccaggtcccggtgggggcggggtgggggtgctgttgctacagaccaggtcccgggggagctgctgctacggaccaggtcctgggggggtctgctcctatggaccaggtcccgggggtacctgcccaccaccaatttgcagggtacatcttctagttccttcttccaaacccatcatctcataggtgaggcagggaaggggagccatgagggtgacgtaagggagagggaaggatgaggggggcagggcatggacggactggggatggagcaggtggccgaaggctgtgcttcccactgagctgcgtgcctggtgtcaggtggtgtatgaggagagccgcatggtcagcctcacagccccctacgtgtcgggcttcctggccttccgagaggtgcccttcttgctggagctggtgcagcagctgcgggagaaggagccgggcctcatgccccaggcaggtgtctcatccctaggacgagagaaaggtccctccttccccctgggggagggaaggctgctgcaggtcgccaccaccacagtggcagggagagactcatgagcttcctggaagagaggaatgaggatttctaaaaagctggaccccagagacagtgcccccttcttgcctcagggatggccctgtcctgagggccgaggggcagctcagctgactgtgactctccctgtggctccataggtccttcttgtggatggaaacggggtactccaccaccgaggtaatcctgctcttggaggtccagggagggcactgtggggaagagcggggggagagggcacctctgtcgtcccccacagaaaatgctgggccctcggcctctgccgccagccccctccaatggcttctttctcggcgcaacggggacgcgcagtgcgctcagccccgcctcccccaccgccggtaaaggactgtctactttcgcttcaccccttacctctttcctgtccgccactgccttctctacagtgccctgtgctggctcatctccaggtgccactatccagttctgacctgatcaccaaaagatgtcccagggcccgggctcagagtggccttccctgccagccgcccaacctgcatggcccgtcaggccccttgtccacaactagacaggtgtacccaggcccccactgatgccaggaaccttggcctagggagcgtggctgagggagatgggctcttttttttttgagacggagtctcgctctgtcgcccaggctggagtgcagtggcgcgatctcggctcactgcaacctccgcctcccgggttcatgccactctcctgcctcagcctcctgagtagctgagactacaggtgcccatcaccacgcccggctaatttttttgtatttttaggagagacggggtttcacgtgttagccaggatggtcttgatctcctgacctcgtgatccgcctgcctcggcctcccaaagtgctgggatttcaggcgtgagccaccgcgcccggcctagggagatgggctcttttactgttacatacagagctgcgggcggcgcagcagcacccagagagggcccaggaggggtgacattgggccttcctggccagcaagtgtgactcggccctggctgctgccctcgcacatgggtgcagagccaaagggttgtcatgtgccgacccacatgctcgtgccagcgctggcaggccaccgtcgagggaagaggaagctgggaggtgcaggaaatgaccggagagctgcagtatcccagcacgccagcgaggtgctgaccctggcactgaccgtgtcagagagaaggaggcttcctccacggccttgcacccaggacatcgggcacagggggctttcgcccaggtctgcttgggacttagatctggtttccccagccctctgcctgtccacagacctctgctcacttagggaagcttttggtaagactggcttgtcctgaatccctgtgccaggccccagccccacctccccaaccccaccctcctttctctctggcaggctttggggtggcctgccaccttggcgtccttacagacctgccgtgtgttggggtggccaagaaacttctgcaggtggatgggctggagaacaacgccctgcacaaggagaaggtgaggaggggcctgctgcaggccatgcccggcagctcagtggcggggctgtggtggccctgggcatgaggacacttctggaccagcccttgcctgctgacgctgccctcctcatccctggcttgtggcctggagtaagaaagacctgctttcctctgggtgctgcattgcctgtctcagctgagggcgctctgagctcctctcctgcctcctgggtgtgcctgcctctctggtcccccttgcctctgagccaccgtggcacaccaagtagggctaagtcctccagttactggggacaggacgggcttccaggctgtcccgggcgcacttggtgctttccccaccccgccttgccccagcccctgtctcctcccctgcatgctcaggtaccacagcctccaggcccccctcccgccaagacctgcctggagctgccacccacactcttcctacctcaccttcccctgcatcttcctcctctgggaccccatgttggcactgggagtgagacactcacaatggagggagctgttgacacccccagctgtttcactggatggcagattctgagagcagagactgtgtctctcattcctcctagctctcaggtgcctgcatggagaagttgcttaataaaaatctgttgagttgatggggaccttagacccactcaatgagccagtccaccgccgccagaaataccagcctgttgagctgtgtcagatgtgcccaaagcaggagagaagccacaggaaggaagcgggctcagcacccatcactgggcagtggcggcacctgtgtggctgccagcctggcacagcggccctgggcagattgttgcccttgttctaagccccatcatcaggtttgaacagggtcttgtgggcagcaccctcagctcagggacaagaccacttcaccgcctgcacgctcagtgtcgtctcaggtggtgtggctttgcctgggctgtggctcacctccaagatcagtccccttccctttcctggcccagtgactgggttttaaaaataaagagacctgggccggttgcggtggctcactcctgtaatcccagcactttgggaggccgaagtgggtggatcacgcgattaggagatcgagaccatcctggctagcatggtgaaaccccatctctactaaaaatacaaaaaattagccgggcgtggtggcacatgcctgtagtcccagctactcaggaggctgaggtgggagaatcgcttgaacacgggaggcagaggttgcagtgagctgagatcgcgccactgtacttcagcctgggcaacagtgcgacactccgtctcaaaaaatagagacttgccttcagcccttcaccaagaagagaggggtttttttccccatttttccctccattttccagatccgactcctgcagactcgaggagactcattccctctgctgggagactctgggactgtcctgggaatggtgagtagctagggccctgagctcctccaaagccccggggtaggggatcctttgcaggcagacacaggtgcatgcagacacgcgtgcactcacacttgcccacatcaaccccccgcctgcccgtccatccatcctcctgcctctgactgagtccagggtgtgatgtttgtgtttctttcctccagccgtgctgagggagcccaccctcccccagggacaagcagcaggaaggcgccctgagggtgggcaggccctggcccctgagagcactgccccttcagcttcccccttgcccccaggacattttgtcagagctccagctgctgaggctgtcctgaccctggtcccggtggcccagcccacaggacagccctcgccttccttgtcacaggccctgaggagccacgaccgcagcaccaggcccctctacatctccgtgggccacaggatgagcctggaggccgctgtgcgcctgacttgctgctgctgcaggttccggatcccagagcccgtgcgccaggtgggtgtgctggggatgcggggaggcagcacaggctcctctgcttcctgccacctgctgttcagggctccccagcagctcagctggggtcagagtgcagtgacatgaggacgggggttcctgggccgaggacaggtcacagacatcttgctggagagcttgctgggccctgcagtcaggacagtagactggggggtgcagggctcccaagagttcatccccaggccctgcaccccatgcactcagcctcccagcctctctgagcctcctgcacccagatacaggccagcttggagaatcagtgatgttagctcaggtggtgaggtgtcctgccagttcccagccagcccctcaggtcccagagggagcagctgaacttgagccaggaggctcctgcaggaaagctgtgcaggccccagagacgccagtctggggacttgggtatgcccgccccaggacccagcacaaaactggtgttcggtcccccaggaagggtgagaactctgctgaagccatcagctcagctgagaaaggactcagcctgtgggccagggagagacagctggcacgagatgcccacagacagcctcgataggaccaggggaccacaagacacgggtggatgctgtcccagagaagcccacagagtgagggttcaagaaaagtcagtcttaggaagagacccgctggaggaaggggaaggacagccctgggcaggaaggagtttgatgtgctcaagaaatggggggcccggagggtggctcacgcctgtaaccccaacactttgggagacagaggtgggaggatcacttgagcccaggagtttgagggcgccctaggcaacatagaccccgtctctacaaaaaaaacgtaaaaacaaattagccaagtgtggtggtgcgtgcctgtggtctctgctacttaggaggctgaggcgggaggatcacctgagcccaggaggtcgaggctgtagtgtgccctgattgggccactgcactccagcctgggtgacagagcaagaccttatctcaaaaaaactttaaaaaacaaaaactcagcaggaaggtgtggccggagccagatggcagtgaagtacagagtgggtgggagcccgtgagcatcttggggtgcgccagggtttcagacgtcacccacagggacttggatggctgtgagttggcagcggggcgcccgcagattggcctttttaggtggccgctgtgcgtgctgtggaggctgtggacgcaggtctgcacaagccatgctgcttccagcagcccagcccctgagcctccctggtgtctgccccttccccatcttaccccaccgcttgccctgcagcctgccctggggcagccgcagcaccggtggaaaacccccaggccaccaccttcgggccggggccttccggctgctggcgcgcagtgtggcctccagggggcagcagcagcccacataccacaatggccctcgccctggggagctgtgctcagtggtggcgtctgagagcgggctccacagccttgcagggctttgctcagggcacaggtgtgtggactctcaagcctgtgagctgtgtccccagcccccaggaaagaggcctttcttcctccattccaactcagccgtgtggtcttccgagagagaacccaagaaactgtcccccaggccttcagccacaggaactttaggtcgtgctgctgctgcagacagcacagttcctggagctcctgtacctttttctgcctcagcgcgccccagagtaggacagtggcccatccttgcaagggaggggacacctggcctgtgagtaccttaagcatctagaaatagagcaaggatctgtgcctagcaccagcaaagagcctgccaaatcctgggcccaccctccagaggaaggaaagccgcaaccagttgggatatgcagccaccccgtaccaggagcccgcagcttcttactgttgggcgtgagccgaggatcgtgtcctgcagggctggctctgtctctcggtccattttcttcctgagctcactcacctctcaacaggttcacctcctgctctgttccagaaggtcctgggagagcacagacggggttagtgttggtctgctctctccctggctccgcgccgggccgtcttggtggccccatggtcacaggcgctgcggcgctcctggttgccaggtccaggctctcctgccaggccaggctgggccgctccaggggaaggtgagaggtgctggccccgcctaccgctgccccacttcccccatgaatggaagcaggagcaggctgggggattagccgttgctttccatgagtcgtgcagccctgaagctaatctaagctcatctgagctgggatcagggggacttcccagggccagaccccccatgcccccgggggttcccactcagacctgagccctgttcagtgtccctccctgctagggtctgcccccatcccagcctgtggcccaccgccctcttttatcttggtgattctggagacgggacaggggttactgctgatctagtcagggagaggacagaccagctgggctcagagcccccagagaagcaagtgttagcagggaagcctcggcttgcgcagagcctacagggaagcacagactggaaaccagtgaaggctgagcagctccaactgccactggtggggaggagacccaggaccccctcactcagcctgtccactcaccagctactcaggcccttcagggactgcccagctcggtttgagagctgccattgcggggctttgaccccaaagtcccaggcatgcctgtcccacactcgctgacagggccgcggctcctgagcctgaagaactggctgtgacctgtgtgtcctgagtgggcttctgtgggggatggaggcattgccagcagcagctcctggtgggaaactggtctagagaccagctcagcacccagcagcacgtctgtctcccccaggctgacatctgctcccgagagcacatccgcaagtcgctgggactccccgggccacccacaccgaggtgagcacccagggaggctggggcactaaaggggcatctcacagacacctgcatgggctgtttccggtggctcagcctctccttgttgcaatattgtggctcaggacagacagtgcagggccagggaaggcaggggacacaggagaggtcttcaaagagggaggagagtggagtggggtagactcctattctcgtgggaactctccagaaacaccactgcctccacgcaaagccctggaactacggccctgtctggtccaagccctacctcccaatagggctatccccagccttcctcagtccacttagcctgtgaggtaccaggacgtgggctctgcagaaaaggcgtggcctcggagtcagacatgatccagccctgcatagccagctgtggcgtttgcactcttcgagcctcagcttcctcatcgtcgggataggctctgtaattcttgtcccactggttcttgtaagttagagtgacagtgtgcctggcacagtcaccgctaacagtgcaaggcattgtcttaaaaccattgcagatggtttgatcctgctagcaaccttgatgtgagacaagtactgtgaccccactttacagatgaggaggctgggacactgagtgttgataaggagtaaagcagaattcagtctggctacttcctcttctctcagtgtgggcagtttggattccaggccctgcatctgagcctccaggctgagaggacacccccactccctaggcaaagatcgcaggaggccccaggcctgggattcgccctgccctcgcccacgattagttactgaagggctgcggttccttcgtgctcattttccctctaagccaggggctgttcccaggcctccctaggctgctttgagaactgagggagcaggtggcggggaccccccaagctctcccagagttggaggccggcccgcttgaatgcaagctgcgtgtctgagcagcgtgctctgccctgccctctgccctgggctgtagcaggtcctgagtgtccaggccaagcgcagttcccagaccccatctggggtgtgagggggtgtcaggtaggcgctagcatctgatgctgtccctttctcaatgtcatcaccaggagcccgaaggcgcagaggccagtggcatgccccaaaggagactccggagagtcctcaggtgagggccagcccccacaggaccacagcccaggccccaggacagccccaaggccaggctcccaggagcaggcgggcaaggactggcagtagggtggaactgggcaccatgaagacaagaaggccaccggccaccccgttctggcctcaggacactgaccacccctgggggtggtctagggacttaggggaacctcatctcagccgcaggtggagcacccagtccccaaagacaggctgaccgcaccaccccagggggacgccgcagcacagcccagcaccaggtggggcagaggtgaccacggcccctctttgctccgtcatcggctggtcagctgtggtcacggtgcctcagaggacagatctctatgggggcaagtgccagatcctgagagcgcatgagacgctttcccggagccgacgaaggggactcggagctgcagcctgcacgacccctgcagcctgtgctttgcccacccctttcaatagatggaacttgcttgctcttttttattcttctcaggattcattttttatttcacatatttgtttgtttgtttatttatttccattgatctctttaccctgaggtttacttgcaaaatcagggttcatttttaaagcaggtcctcagccccagccacactgaaccacctctgccctgacacgggaggggtcctagctggggtagctgggctttagcacctgctcactgcctgccatgacccctgaccccagtcctggccatcctccagcctgtcccaggaagagggagcagagagcctcatctcagcctggagggggccgaggacgggggcagcacacgggcagtctgggctgtggggcaggaggccagacagggtggcactggtgcctgaggggttgggtgccaggctctgtgcccggcgggggctaggatcgggggtggcaccgtccccacaggctctgaaagttgatcactgtcctctgtccttgcctgccttgccccagaggcacagcctcaaaactgtctccactgtgggaaagcagccctaggcccctgtctggccacttcatcttctcttggtgtgggctagaggcgccagctgaggagtgggggcaaaggggatggcccacctgcagcccagccccagcccctgggcaccttgcaagcaccccccagcccttgacatgccggctggcctccagatcccaggccccctgaggatgctggaatctgccacagagcatgaagaagtccctggaatcctttcttgccattcacctgacctctacaagaaggggccggtgatcatgatttgacagcttgggacaagaatccagggaggccgggtctctggcgcgcctccatgccccttcaagaaggtgctatcctggtgttcctgaggagcagggcgagcctgggcctgagggaacaggtacacaggcagcagcactcagggccggggagtgctggccccacccgcctgcgctcactcgaaagctgctttggagggctgggctgcaggggcagaggctctggaaaagaggcccaggctgtgtagctgcccttccttgatggagcagactctattctagaaatttctataagaagtagactcactccaggacaagtggggctggggggagcggatgccgaggggctctgcgggcaccttgtgcctaaagtcacggggggcacaggagagagcgggaactaggtggactgttgtggctgccatccatcggcaacgctggccggaaccagatgagcagtgtggggcgagagggagccccagtgcggcccctcaggccctccatgcttcagggtgtcagtggccccggactggcctcactcagccctgggcacttgggcctgtcggggatctagctttcagtgaggaccccaccggtggactgaggctcccctcaccgtggcagaggaatctctgcccttcccaccgaaaggggcaggagctagtggatggggacggctcacggccctccctttccacttgccttggaaagggagaggcagcagacaggaagggccttggaactcaggccagtgtggggagagtgtccccagagagtccttggggtgggagaggggtggagttgacagccggtgaggccggctttgaggttgtgtggaccctgtctgcctctagctcaagttgggaggggtgtcagctgtggagctgtgtgagcctcggggacagccacatgtggggtgcagaccggtctagatgtgcctgtctggtgggcgctgaaggtccccttgggagagtccagggcagcacctgataagccgagagctgcagccgtgtccacctggaacctgtttcctcaccgggaacatgaacacctgcttcagaagctttgggggttaaaggtggggatacacataggtctcttgcccagcggtggacactcggtacactcctaataaatggggcatggggtggtggagtccagcacctggctgggcccaggaatgaggcatcagtggtcggagggaagggcgtctgcccacctagcatctttggcaaggatctgcctcccagcacccctgtggagtcctgtctggatgggagggagagcagggccgtggacagcctccagaggtgttcccctgaaacctctgaatgtcaccagcacaagcaggctgggctgggctctcccggcagtaacaccaaccgagcacagccgttgtcctggggcatgccgtccaggttgggggacagggaggcagaggtcccgtgtcattgcccgtgagtccggggcttaggcaccgctctggggacccctcatgctggcccccaggcccactgaggcataggtgagaccattgcatggtccttggaagaacagggctcctcaggcagggagtggacagagccaatgctggcgatgggggaccttgcctcaagcagagtcgtgggagatggagtcatgggggcgtgtgggggtctaggcaggggagctgctgactgcaggtggcccagcagtacccaggtttctgctcgctcccattccacctccccgagggcactcgtgggaaagggaaacatggcacccagctggtgcctcattccacctacctcctgagtcaaagggctccaccaccccagacacacccagagcctggtgtccaggatgccatgtgtgtgccccaagccagtaggacccttgggaggctcagcaccccctgccccaaacaaatgcctctcccctctccacactcactggcattcccacagaatgccctcctgacttctagagctttccctgtccagagctccgggagcacaggtggcagggaattagaggcattagaagcacagtgtggaagctgggcagagctggctgagatcccactgtctcttccaggctggccttgagcaaagctcaaaacgcatcccacaggggtcagtacctgcccatgtggtgggggatattccaccaggtgaagtgtgtaagggctcagcagggagccttggcacatggtgagtccttggtgagggaaggctgttggtttggagaggtgaggcccacaaggccgtcagtccgccatgctgtgccaaccccagtgatgagaggatgaagccaggtcagggaggtctcatctaccaggctcccacctgagctggcagctcctcacgccatcccaagccatcagaactcaggtcctcgaagggaggcctggctgcccccttcctctggagccagacaggaccacacctcctgcgccctggggcttcactccaacaggggagcttcccagggggccgggagactcagaagaaatgcccacaactgcctggcatgtggtaggctttgcacaaagagcagtagcttcaaccccaatgacccacctctgtgaggggggcagagatggctctgggctcctctggggctggaggtcaggctctgcttaaaaccgttggttcctcaaggaccatgggtgtcaggtgggcctccccagctgagggcctggccaggacctggtcagggggtccttcattttcccctccccttgcaagaaggagcaggccagagcctggagataagtttgcagacaatttttacgtgagtagtttatgtttgttttgagataaaagtcatcatttccactacaactcattgacttttggtatattcacaatcatgtgcaaccatcattactgtttagttccagaacggttttttaccccaaagggaaaccccatatccattagtagtcactccccgttctcccttccccagaccctggcacccagcaagggcttcctgtctctggacaggcctgttgtgggcaccatgccgacgtggaatcaccgtgtgtctctggacaggcctgctgtgggcgccatgcaggcgtggaatcaccgtgtagtcttttctgtctggcttccttctcttggcataatgttttcaagatgcacctgtgtcgtgccaggtgtcaggacctcattcttctttatggctgagtcatattccatcatatggatcagtataaacattttgttaatcctggtggatatttgggttttttccattcagggcttttgtgaataatgctgcaatgaagactgatgtacacgcttttgtgtaaacatgttttcagttgccttgggtatatatacctaggagtagaatttctgggtcatgtggtgaccctgtgtttaactttctgagaaactgccagacttttccatagcagctacatcagttcacatccccaccagcaatgcccaagggttccaggttctgcacaccctcaccaccacttgctattatctgccgcttagattctagccattccttggagtagaaactggtgtttcggctgggcacagtgagtggttcatgcctgtaatcccagcactttggaaggctgtgacaggaggatcacttgagcccaggagtttgagaccagcctgggcaacatagtgagacctcatctctacagaaaactaaaaaattaaccaggcatggtgatgcactcctataatcacagctactcgggaggttgaggtgggaggatcacttaagcccaggaggttgaggttgcagtgaaccgtgattgtgccactgcattccagcctgggtgacaatgagaccctgcctcaaaaaaaaagtggtatttcattgtgcatttgatttgcatttcctgatggctaatggtggtgagcgccttctcatgtctagtaaccatttgtatatcctcgtgagcaaagcatctattcaaatcctttgcccattttaaaaattgggttgtcatcttgttgagttgcagaagttctttatatgttctgaatcctagatattgatcacttctttagtttacaaatattttttcctgtgggttgtcattattttcttgttagtgtcctttgatgcatgaaagtttttaaatttgatgaagtccatctattttgttgcttatgcttttgatgttagatttaagaagccattgactaattcaaggccatgaaaatttacacctacatttccttctaagaaatgtatagttttagtgcttcttacctttaagtctttgatccattttgacttaaatttgtgtatggtgtaagggagcaggtcccatgtcatacctgtgagtagccagttgtcccagaccattttgctttgttgttgagacagggtctcgctctgttgccaagactggagtgcaggggtgtgatcatggctcactgcagcctcgacctcttgggctcaagcaatcctcctggctcagcctccagagtagctgggactacaagcatgtgccaccatgcctggctaatttttttttttgagacagagtctcgctgtgtcgcccaggctggtgtgcggtggcgtgatctcggctcactgcaagctccgcctcccgggttcacgccattctcctgcctcagcctcctgagtagctgggactacaggcgcccgccaccacgcccagctaatttttttttttttttcagtagagacggggtttcaccgtgttagccaggatggtctcgatctcctgacctcgtgatccacctgcctcagcctcccaaagtgctgggattacaggcgtgagccattgtgtccggcctagtttttcaagatttttttgtaaagacagggtctcaccatgttacccaggctggtctccaactcctgggctcaagctttcctcccacctcggcctccccaagtgctgagattacaggcgcgagccactgcacctggcccatttccacttcctcctttccactctgaacgccttttatttctttttcttgcctcattgctctggctggaacgtctagcactttgttgaacgtggtggtgagagcacacgtcctcgtctcattcctgatcgaacgcggtggtgagagcacacgtcctcgtctcgttcctgatcgaacgcggtggtgagagcacacatcctcgtctcgttcctgatcgaacgcggtggtgagagcacacgtcctcgtctcgttcctgatcgaacgtggtggtgagagcacacgtccttgtcttgttcctgatcttaagggaacgtttgcagtctttcaccactagatgtgatgtgagctgttagattttcaaggatgctcttcatccagctgaagacggtcccttctagtcctaatttgttaagtgtttttatccttaaagggtactggattttgtcaaatgcttttctggcctctattgaaaagatcctgtgttcttctgtgaatatgaggtgttacattgattgattttcatatgttgagccagtttccatttgtggaatacatctaactcggtcatggtgtataatccatttactctgctgctgaatgtgatttgcttgtattttggtgcggatttttacatctgtatttataagggatattggtctggtgttttcttatgatgtcttcctttggttttgatatcaggataatattagcctcatagattgggttaggaaatgttctctcctccgttttttttggaagagagagattggtgttaattcttgctagaacctttggtagaatttgccagtaagcctatctggtcttgggtctttgggaggattttgattcgattcaatctatgtatttgttatagatcgttcggattgtccatccttgagtcagttgctagcttgtgtgtttcttggagtttttccgtttcgtccatgttatctcatctgttggcataccgtcgttcacgggattttattgatgtgtgtgaggtctctgagaacgtccctgccttcactcctgcttttagtcactggcatcttcttttaacttgggccatctggccgtgcatggttttgggagagtcctccttgactctgcagatgctgagcagtgatctggctgggaaaggggaccaggagtgcagggcacctgctgaggactcacctaagcccaagagtcagagagtcggagctccaaccacatctgcctgcatgcctttcccaggctctccccaggcggacagccagcaccccctccccaaagaccgggcagttcctgaccagcaccccaccaagtcctcagtaaggcctgtctttgggggagcagggtttcaggaggacagtgggggtggtgtagaactcatggctggcggttccgggcctctcaggaagctttgccactgggcttggggttaagtgggtgtggggctccgaaccctaaatgggtgagagttgaaatgaaagcggcacctgtagtccgtttggggtgcaggtgtgtgccaggggtcttcagccccggctgatggccacatgaaccacatgaggagaggcagggcgtgtcagcagcaaacctaagtgtgtgctcatttctgtgggcccttactctgtgacactgcagctctccagagagacgctttgaaaacaaaacaggaaagaacacacggccccgcgtctgttgcctgagtcactgtattccttaaaaggtgaaggaccctggtccttggcttttcgtgcacatgagaaaatgttggccaaggttagcgattatgcttctgtaatctgtaaccagaagtgctcttatgcccaaaccttgatgtgattctgctgtaatgtaacttcggagccagctggatggatgtgactgtgcaggtcctgagccccggcccccgtaaccaagcagtgggccgagacactgagccgggcagtcaaacaggagctctctaaggctgctcccgggctgggacctgggtctaggattctcagtaagacctttgaataaaactaacttgaattcttcaaaagcttgattttttttcttcagtcaaaagcatcttgcagagatgccagcccaccgtggggatgtgcagtggcagccctgagctggcccagcccctttccccaaggctgctctggggaggggggcgggtttgggggagtagagtgcaggggattgaagcaggggaaacagggtgtgagggtcaaggggggctagaattgggggagcaggttcacgggccaggggctgggcaggggtgggcctgggcacctggtaggtgggggagccccaacttcccatccctgcgtcacacgcccttcccctgcagggtgggggtctgcagggttggcatgtgcccccctgccctgtccccaccctactccccggcggcaggcagaggggcgtgcaggggggccctaagtgcagtgacgtctcgactctgactccgacccacagaactttaaaaatagggccgtggtaaagtccgtctctacagaccacagcctgcccagagctaagaatattcttgaaccacttaataattcaagtcagatccaaatagattttcctgctcacttgcgggcctctgtgtccctttcccaggcccccaccctgcctggaggctgggagggaaagactccaagaagcaggtgggcctggcctttggagcctctgagaccccagctgtcctgcgtcccctctcctgtggcactcaggatcagaagacacaccagggctggagtggtcctttaggatctggccaaggtcaggccccagggaggggcccctctggtggtcctagctgtcccaagccccacccctgctctggccacaggcattggactatttgaatctgggtctgagctgggccttggccccttgcacagcatctgacctgagccacgcacctctcatgggggccccgtcctccagggccaagggcagcatgagctccaggagagccagcctcgcccctcacaccctggtagctggtacacgcccaccccagggcctgtgtcctgcctcctctgcggaagagtccctgaagggcctggcctggggctccttgtcctggtggaagtggctgtgcacaggcaaccagggccctgggttccagaccaaggcctctgtacttgtgtgctgtgtgtgcttgggtaagccacctcgcctctctgagcctcttatcagtgggaccgatgcttttagaataagctgtggtgtttggggcaggaaggggtatctgacgggtgccctgaggcctgagtcaccctctcctccaggggcagtgcccaagctgcagacacccctcacccatccctgtctccccccaggctctggtctttcaaacaggaactcagggtgaaggggtgccacctgggaatgtttgggggagcccacacttgctggcggggaagtgctcaccagcctggccccccaaccccggcagcagcccagccttagcagtccctgctgaacttccctggccaggccccgagtggagttttaccaaattattaattaagggcaaagccatgctgcagcgctgacatccagatgaatagcacgcagtgtaattaggcgaggtgtcatggagatgatggagtacagcctgctagccccaattcacctccccggcaagcaggagcaacttctctgtgtcctaccaccatgggcggctggtgtggggccagtaggggtgtggctaaaggggccagctgacagctattgcgggtgccacgggccctgtggacagggctgggctcctcccccagggacaggcaccccttcccctctgattgccatgggcagaacccaaaagggagtaaagtgcagaaaggggcaggcaaggtgggaggcaggctaaggcaggagggatgaggaccaggacaaatccacagatagacccggagcagcccagagaggggcatggagggagcacaggagggccgagaggggccggggaggaggtgcagaatccaggaagacaggacaggcctcggggccctaccctggggttgcctgggcctgacagagagctgggagcggggagcagcttgagaatttttggttttgttttttagttacttacattcatgtatttttggttgtttgagacggagtctcgctctatcgctgaggttggagtgcaatggagcaatcttggctcactgcaacgtctgtctcccgggttcgagcaattctcctgcctcagcctcctgagtagctgggattacaggcgcccgccaccacacccagccaatttttgtatttttagtagagacggggtttcaccatgttggccaggctggtctcgaactcctgacctcaatgatccacccgcctcagcctcccaaagtgctgggattacagacataagccaccgctccctgcctacatttcatgtatgcttttaatcaacatcataaattgacagttttaataatcgaatagtactacaaggcttctgacgaaaaaccacacctctttcctgattcccccttctcagaggcaaccttttctgtgattgtagctgattctctttggtatttacttccgaatagccatgctcatgttgctgctggtgctgcttttttttttctccttttcagattgagaaatttacccatgtccttcccacgatggcggctgaaagcttgttctctcacacgtgcccccccacactctcccaccagcttctccttttgattgaatcagaattcaatgtatgcactattatttctcagcacacactcttcccagctgagtaatgtattgtaattacatttcctttcttgtacaaccacttatttttcctggacttaataattgcctcatttaggggattgggttgatattctgtgtacccattacttatttatccccaaaccctgccatggaagtataaatctccttttggttcattaaaaacatccggcccatctgggcacagtggctcacgcctgtaatcccaacagtttgggaggccgaggcgggagaattgcttgagcccagtagttcgagaccaacttgacaacatagcgaaaccccatctccatcactatttagttttaaataaaagatatttttaaaattaaaaacatccaggccaggctgcgctgggcccgcctcactgtagggggctgcgctgggcccgcctcactgtcgggggctgcgctgggcctgcctcactgcacgggaagtgtgctgccgctgtccttggtgctgaagtcaaggctggggccggagcctctcctccagcctcactcctcttcagcttccgccctgcttcgcctccattcctgcccaagaccccctggggagcagaccccaggccctcctcaagactgccgaccccagccctcgtcccagcccaggccatctctcccaggccttgcctttctgtaccaggtggtcttcctccccagggggctcctccccgcagccctggcagacagcttgaatcctggagttgcagcaggtgggtgtctgagtggagctcccttgtgtataatcagaactctccaggttacatgtgacaaaaaccaacttaagcaaagctgggacctcgttagttcactccaggaggcagcgccgccctgcatggcctggccttggctccctccctctccgggaggctgctccctcatcagcccagcctcacttcctcacccacataacaatccttggcagagtgagccctgctgttccagcggccccagtggccccagcgaaggccccacgccgacacttgttggctggccaggcttgagtcacatgccttcccctgaacccctcactgtggcctggggtcggggggccaagtgcccagtgcagagctagggcctggagcagcctcagtgcaccttgtggagagggggacttctcagtagaacagcactcttgccaggagaaggaacacctggttgagaaaaccgaggtcaggtgaccttctcaagaagggtcagtggcttcaggatctctcataaagcttcatctccaaggcccaaggagagcaacagtgtcccatcttgtctccaggtaattctattccggtgccagcagagaacagcgtgattaagcctccattattaacttgccaatcttgtttctggggcacagacgctaacggcttaggggacccagttggcatataatgaggtctccatgacaaattacttggttatcaattaactatctggggaaatgtcaagcaggatccatcatgctggcaggaagagagagccaattaacccagggcagttcatccaacccaccgtcgctgcgtccagcagggccaggaatgagagaaagggcctgtggagcccagagcagggcagttcctccacccccccagggacggtgtgacaccggctgcggctacactggtggcagcttctgcagtcatgcctcgcgtgctcggcgcaccactcttgcctgtacctgtctctgtccattcattcattcattccacagtcacctgcatgtcagacctggaccaggcacggatgggagaggtgactgagggctgaggttagggagggacacacgtgcagactgcagacaggtgtccctgtcttgtgtggtctctgcagtcagcaagatgggtaacagcatcctcaggacagggaggaaagaagagttcattctaaaggtggtggggggacagagagagcatcatagctgggaggagagaagagttcattttaagggggtgggcgggggacagcatcacagagctgggagaagagttcattctaagggggtaacggggggacaaagcatcacagagctgggaggaggagagaagagtttgttctaaaagtggggggcacagaacatcatagagctgggaggagagaagaattcattttaaggcggtaaggaggggacagcatcacagagctgggagaagagttcattttaagagagggtgacagagtgtctcagagccaggaggaggagagaagagttcattctaaggtgggggacagagcatcacagagctgggagaagagttcattctaaggggcgggggacagagagacacagagagactctgtgacagcatcacagagctgggaggaggagagaagagttcattctaagtgggggttggggggtgggggcaggacagagtgcatcacggagctgggaggtggaggaggagaagccaggtccctgagacaaggggcagggtgggtggccaccaggcagagggtgcccaggcacagcaggggacggggctgctccaggcttgggcaagggaccattgactgtgcactgtccggacctgagcagaatctggctctgccgtcgctgtgctgggagaccttgaaacagtttagtaaaacctcgccgggcctctgttttcttatctataaaatggggataataacccccagttctgggagtgttgtgggaactaacactgtggcccccacttggtgctggctgaacctggttcctccttctcctccctacaagagaggccttggacccacctcactggtgaaggctcccagggtgcacatgccggagcagaggcgcagggaggagggaggcatcctggaggaggtggcttgggctgtcctggaggagggaggtggcttgggctgacggccggcacacggacgggcccgaggccgagtggcagggtcggggactttggtcacttatcaaagtcaaagcccaggactttttgggttttgctttgttttcagcaaaggcccttgggtcacctgcgatgtgtcccacccttgtgagaaccagtgacgaagccctggccctaccctgtcccctggcctttgcctgtgcccccaccccgcccctctggtagccccctccccttgcctacttgggggtgattggcagctgcctcttcccagccccccaggccatggcacggagcctcaagcctattcatgatgcggacatatggcacctccacggggggcttggaggaaactgccaattgcgagagtgcagcgtgtccccattccagccctgccggagcaaaacaaacgcaagtcgcgaggggagcagaggcggcccgggggcgtgcgcatgtgtgcgggtgtgcctgtgtgtctgcagctcacaccgcgggggtgccgggaggaggggggctgcccgatccttgggagtctgcggctttcagacgctcctgggggctcggctactggggtcctaaggaggcgagctggccccctcattccgccccgcaggccgtgcctctcctgtcttgaggccgcttttgcctccccacacctcttacccaggacgctgggctggaggctgtgaacagccctgggagcagatcccagagatgctctcattctttccggaatcaggacgttccccccagtgtcaagcccaagtccccagggctccaggcttagccaaactcttctgttttattggaggtggcaccacccccatatcagtgggggcactgcagccaccagtgcatggccccctaggcccctgccccatgctgggctcaccctcctgtgcccagctggggacccaggcatgacaaagccctgctcctgcggcaggggagggcgtgggggggtgggggggcgtggggagggagtggggagggctgcaggggagggcgtggggagggcgtggggagaggctggccaaaggccaggctctgggggtctcagcacactcctctcccgacccagggctggaggctgctgccatggaaaccaggcctgtccacccactggccatgtgcatccaggggccatggccaccacctcctagcacccagctctgccccccacccccattcgggggagtgagaagtcaggagagagaggaagggcgctaagcagaacctggagggtgggcctggggtaccagaggctgaggtgctcaggcaggctaagggtaaggggcctgtcccctgagccccagctgagggtctaaccctctgtgctgctgggaagctccagaccctctgccacaaaccttggcatgcacttcgggcagtggcagcccctgtggggtgtgtccgtggcacccatcagcctcctccttgtggctggggcctaggagcagaatctgcacgctttgggccttccccagggagtcagggaggcgagggtgcagcccgctagagagtggcccatccatcagttccctcccaggagcgctggctggggatgctggtggggaggggctgcaggggcggctctgactccagctctgccgacaccctgtccccagcactggcaggcacctgggtgtcctaatctgtctatagcctggccttggacgaggggcctctgccccagctgggtgggtgtttcagggcccaggcccccaccttggctggcagcgtgcacacccgccacaggcactgggccgaccaagttgcaggcaccactgtgcatccaagcatctgctgccgccgtctcggggcagatgggctgccagtgagctaagtgtgtgcgggggaaggggtgccataggaacccctccccgccgggagcgcgggggcgggagaggcaggcacccgccggtgggggagccgggagccatcagagggaggggggctgggatcacatgggctccagggttggggagaggcccatgcagcccgttcctgggccaggggctcaggggatctgggctcagcctcggaggatgcagagccttagaggtcctgatcagggctgggagacctgtcacccctggccaggtggccctgggcaagtcccttccttctgcaggcctcgggccccaggagtgtgtgtggatggtctagagggtgccttcccgctccggagccctgtgccttggcaggatgaaggcgtcctccgcacacagatgcctgccatctgcaggggcctcctgccaggggacaccagcacaccctgccagactgatccggggcacgtgggctacacctccgccccttgctccaaggctgtggctcccagaaaggctggggccatgctgtgtgttaagtgaggccacttcggagtttgccagctttccccagtccctgcctggccacagcaggagccccacggtgaggggacctgccaggctgggcaggatgctggccagggtagaagatcctgccctgcccctgctgccccccaagcccatcacactgtatccaagacccctcaggagtactgggatccgaggaaggagggagtgtgggagagttggcaaggagacagcccaaggccaccaacagccttggaagccgatttgttggggcatcaggagggccttgagcagagaagacgaccccacggacaaaccctgcagcatccctgctccaggagaggggtgcccacccggcctcagggggcttttctttcatgatggcagtaaacagagcaaagttgtctgtgctcagtccctgtcctgtgccagaggctgctctgagaactcagctcttctgtaattggcacaagaatgctaagagccacccttatgcccactagacagaaaaggagactgaggctgagcaagctggggcagctggccccggccaggggccaacgaatggctgagctggaatttgagcctgaagtctgcttgaccccttgggctttctgaccagagcaccccactggaagggcacgtgtcctccaggagaggctgcctggtgcctccaaaagtgcagggaaatggggcaggtggcccctctgtgccccctcccccaccaagcctaagggggcccccatcgccaccatggctctctcggattcaacagatgcctccgcctggctgtgactcagcctcttagtttgttggtggttgcctttttttttttctttttcttttccaaagtatgacatcgccactgagccttggcagagtggctcccaggacactggcaggtccctcccaggccttgctcaggagtgcccatgggtggccccagcttgcaggggccaaggtggctgatgaccagatgccatgacaggcaccccaaaagggcctcgcccttggactgtggccctgggcagactctgttaccttcaaagtaggcacagcccatcccttagttgcacctgactggggcacagtgccggggacacctgtccaaagtcaccctccccagctgcctcacagcccaaggacatctgtccaaagtcaccctccccagctgcctcacagcccaaggacatctgtccaaagtcaccctccccagctgcctcacaacccaaggacacggcgcgtacttgacgttgcagattgggccagaaaccctcctggggggaggggcccagagccctacttttcacgggtgggctaagaaacagaggatgtgtcttggagaagacttgcaggccaggagcactgcccattgccaaggccagtgggctgagttccacggagagaaaaaggctttccctccatgaaggaagctttcttggcatttgggactattggtagagcccacagttttttttgtttttttggttggtttgttttgttttatttttattattttttttttttttgagatggggtctcactctgtcacccagggtggagtgcagtggtgcaatttcgcctcgtggcagcctcgacctcctggactcaagcaatcctcctgcctcagcctcccaagtagctgtaactacaggtgtgtgccagcacacccagctagtgtgtgtgtgtatacacacacacacatatatagtagagacagcatcttgagatgttgctcaggctggtctcaaactcctggcctcaaacagtcctcccaccttggcctcccaaagtgttgggattacaggcatgagccaccgtgcctggccttagcctgtgttttgtgaggtggtgagttccctgtccccagaaggatttcagcagggatagcattcctcacgggactgagtccctgtggtgcaatcagagaaaagagtcactcacagctggagttggtcatttcaggttcaagtccaggcgtgtctgtgtgaactcaggagcagggtattaaacctctctcctcatctctgaaatgggatttgggtctccctcaaaggcagttctgaggtcaccctcaaaggcagttctgaggtctccctcaaaggcgagactgtgtgcagaatgtgtgcagacattttcatgccccagtctgactcatggccctgtgcatcttgacaggtctctgtctctgggagcctcatcagaagaaatggcttaaactccacagggcgggatttggggaggagaaagagctttgggctatggggagtcaggagacgaggggatggcggggcttactgtcctttcagtgacccgagaaagaggctggcttgggtgagaggaatggggcagcttctcttgcctctgggactcaggagaacccagggctctgaggcttggagggggtctggaagctgttggggggcaggtggggcgctcatggcatgtagaactgggacatgccaggcaacagtgaggaggccaagggtggtgggaaacaccatctggcagtggcaagcaggtctgggcgtaagaggacagacaatcccacgtccaggacgacagtcccaaggcagttggctcctcctgccccagcggtcccagccgacacccacgtccttccctcttctcctcctccctccccggctgcccgtcctgtgcccatttatcatgcccatggtagtgccccgaatggtggtcccaggtgtccacccacaacctcagaatgtgaccttttttggaattagtctttgcagatggaataaagttaaagatttcgagataaaatcatcctgcatgaagggttaacctgaaatccaatgacaggtgtcctcgaaagagaaaggcagagggagatttgagacccagacacccacaggggaaggtagaggtgggacagtgggagagatgcatccacaggccaaggagtgccgaggtccccagcacccacggaagctgggaaagcggcctgggacagggtccccgcagaggaccagaaggattttggaattctggtctccaaacctgttagagaataaatgtcggttgatttcagccatcaagttgatgctcatttgttaatggcagcccccagagagggagacagcctcccttcccgtctctccagcccagcagactgctgggtattggggttggaaaagtctttcaagggctcagggagtgctggggtggccaccaccttctgagcaccatcctgtgcctgggcctgcctcccttgcagcccgagcccaggcataggagccagctccactcgcacctgccagcctcagcctcagcctcagaggtgagcaatgccaggaagccgatgcctccagaatcccttgaccaacggggacggcagcggggccctggctttcagaacagcaggtgcgggctgctgggtccatgcccggtgggggaggctgcacggttgggcccttgttcttggctgtgtggccgccgaggctctccggaaggttctatgagcctcctaatatcttgtattgggttccattaagctggccagagtgggttctgccggttccaagtggtgtgtgggatggggaagtgctctcagctctgtccctgggacaggtggggggtgggcgcgtcacatgccagagatctggggtgaaggcctgaagacccttcccctcctgctggaggagagccgacctcccccacagggcctcgtgggagtacaggcggccagcaggcccgtgggagatcaggagggagatgtgttcatagccggcactcgaggcacctgggttcgggacacacctgggctcgggtcacagaagccccccattccccaggttgaagaggcctgggctttccctgggcctggctctcgctctcctcccccaacgctgctctggtccccggcggcctcctcagggcccaagtcctccctccccctgtcctccttctctccactacccccttcttagaaatgaagtcatctagaaaaataatcaaaaaatagaaaggaaaaaaacaccttagaaaatgggattttttttccccttcaaacatttggtgagacacctcccacacggatgagtggccacggggcctgttttggtgtgagagagacttgggcctgtacccttggagttgtgagaggcaggggggcctcccagtcccacagtgggggtctacactaggcctcccctctgcagcctggccaaggttggccccagaagcctgaggtccccgccgatgccctgagcaggaaggccgctgagtccccgaggccagggtgcaaggcagggtgggagggctggcgggggccaggccaggggctgcttagcacctaagtgaggccctgcctccggtctctcccctcttcccacccggcccacgccgctgcagggctctggtttgtttatttataattcatcctctgcctgcttccaagaaggctcccggcacttactggaaagctgcttcctgaagctccgttgtgctcctggcaggctcgggctcaaagcccgtcaacgcttccccatcactcgcaaaggcagacgactcagcctggcttccagggccctccagatctggcccccaaatgcagtctttccgccacttcctgatgtatctcctggccccagagggaccctcccttacaatgcagattgctcgagggaccccgggacccaggatacttcctcctaccttgggatcagaccctccctcatcccatggcgccttctctggtcccgacagtgggggacgttgacacctctcttctgcccattggctgtctgctgtcacagttacctggtacaggctgctccttctggccccagcccgacctccccggcccttggaggagcttaaccaagtcaaactattgttaaggttgatggtgacaatgccagggaaggtggaggctcccctctgcctccggagtggcattgaagacggaggtgcctgcagttggtccccacgctcgataggcaggaagctttggtcaggagtggggctgagaggagccaccctggtggcttagtctggacgcctgactgggggttccatgagtgtgtcctcgggggctgggtggcgaagtgtgactccacgggctggaagggcggggacacagtgtggtgagaaacagcatgcagggctgcaggcggcagctctgcagtcagggctctgggctcagggagctgtcccctgagcagggaagctcacaccagaattggtcaggcaacccagggatctgtgagggataagagatggtagttgtgtgaagcctctaggctttggggtgatttgttacacagccaaagctaactgatacagccaggaactgctgatggcacagccggaagtcccacccacccttgagagatcagcccctgccttgggcaggaagcccaggaggctgtgggaagatctctggcctgctggaggccccggttgctggtgctaagaggaggggcaaggagggaccagggaaggggacaccctgaccactggagtgctgaggagcgagttggggggtggccagattggggttagcagctcgaggggcacacctggggggctgtttccaggtggatactggaggccagccagcaggctcccttgaagcaagccctcatgccaccttcccagcccatctgggacctcaccacatcttgcttctgggaggagggtcaccctcgatcctgggcctgctgcctcaggctgactcttccctgctgtggctgagtgagcaagctcggaccctggcctgagggcctgcttagtccccctctcagatttgcaccggtcagggccaaataactggcttagccaggggaccctggaaacctcacttcatttccttcaagccctaattcctccattgaaaaacagggccctgtgcggaggagtaaacgcgagaaagcccacggggcatccatgcatatccccctggctcagggcctcagctttcccttctgtaaaatgatgctatctcttccgcttctccctctgccagtctgtacctccaacttctacagagcagaccggatgcctctgcccgccggcagggcacgtcacaggtaaggggtgggggctgtgccccatcctccaccatctgtgggctccagatcccactggcctggtaccatcagtcatggccaactcccagcttctccctccctcagcttaagcagccactgcctggcagaaggggagccctggcatggcaggacccttggggactgccctcaggaagcctcagtggcaagggcagatgccagctgggctgtgtcagggatcctctgccacctggcagacacactacagagcgtggcctttccctgctgccgactctccttgtcactgagttccgtggggccacagatgtcctggccatgggggtcaatgcagaacagatgtccatccctggccacaatgctctgtgccagaaggacagtgccagaatggccccttgctgacacagccccagaacccctgactttggaactgggtggaagggaagagaggagccaggtgactccatctcctgaaggaactacctttgggagcccaggaccggcccagaagcatctggctgtggggtggcctacagcctcctccccacatggctggctggcagatggctgccctggcctgcccaagccacatgcccggcaaagagttcctctgccagtgccggggcccacgaggaagccggctgtccggacatttgcatgcaattccgggcagccccggatgcttgtctggcttccagcctgggaagtggcatcgagccctgggaagaggacaggcttcacggccacaaagagctcaactgaagatctgaatcctgcatttagtagtggtgtaaccggggtcaggggctttctgagcctgtttcctcctctgtaaaggaaggctaatgtgtaaatgtgagcttgacatctagagccacatccagcacagaggaggcgatcaatgatggctggctccttcccttcgtccatggctcacgccttacacctgctgctctaggcagaaatgcccccctgagaacccctgagaggacttccagagaccccaccctggaaactgatcccaccctcctccttctctgtgacttccacacagcctcttcctcatcattccttcctaccagactaaggggccttgagggtgataccaggtgttctccagacaattcaacacctagcagagtgctgcgcggggctgccagcataaatcaatgacatctttcagcccagagggttctgagagtgattgcatttgacagcacttcctgaggcgcccctggcctcctgaggaatgagctgttcagggcatctggcaagcagacaccagtccatgctggcacccttccttctggagagtcacccaagggagccaccgatcgctgctagaactggagcagagtcctcaaacaacagtctgcacacagacaagacccgggatatttctttgatccagctcctgccttacaggacttcatcttcacccattcctgaggaaggagagaggaaaaaaagacctctcatacaccccctcagtctagtgtttactgagcacacactgtgatctggataagagagaaactctgccgtcttggtgctttcagacaatacacatcaaattacattatcaacgatgctggatggcgctaagagccggggagggaaagcaagggagtacaggccacagaccgtcctggacttcgagtttgacttacattttggctttgccatggtacaaacgccatacacattcagtatactcctccgcttacagatggggttacatccggataaacctaccgtaaattgccttacaatgctttaacctatgatgggttgatggggaatctaaccccatatgacaggagcatctgtataggaagggggcacggttttcaacaggtggtcgcctcactaagtgggagtcacagggtttcaggggaggagcgttccaggccgcggtaacagcaggtgcaaaggccctgaggcaggacggggcagggaggtccagagtccaccgcgcagagacccgggaggccggcaggcacggtgaggaccttgacttaaacccaggaaaggggaaccacactggggcatgacctcctgtactttccgagatcgctctggctcctgtgttgaggagactcaggaggggaaggtggaagcggggagacccagctgagacgctactacagtcatctcggcgggaaaagacggctcggagcagggtggtggcagaggtgggagaagaggtcaggtctggggaaatttcgaaggcacagccaacaggatgtactgccgggctggatgcggggtgttaggggtcagggaggccgccaaggctctgcctgagaactggggagggccaggggcaccatttacggagctggggaacagcaggagctcgttttgttagcaggtgcgaggcgccgggcatttaaaggcggcctgacgggaccggccgaggcggaagaacggacagggccctgcgggaccgcgctcggatccgcctcctccctgacctcggcgtccccggctactgcctccagagccgcttcggggccgaccccggggactcttcccgcctgcggcctcgcgccagcccggccggctcgcctagtgcccggcgcccagaaacgcgtggagctgggagaggccacacaacccacgccggaagcctaaccccgtcggcccccgcggccggcaccggccggaagcccgcgaagcctaactctcgcgagacgcctcctgagtcccgcctctccgcggttccgccagtcgccgcgctcctgtctgcgttgctgtggcagccccgccgtgcgtccgcgttcccggagccagcgcggcggcgcgcctgtgctcggggcttggccgtagcttttcctcaggtcccgcgcggcgcgcccctgtgtcgcaggcgccctgccgctgcccgcagcttttggggggttcgggggcgggggaagcagggccgcagaaggcccaatcggagccttctgacacccgccccggcccgccgccctcccggagcttccgtccccgccgcctggctccttactgacacgcgcgccgcccccggtcgcccgttttccctgggctccggcctcctctcgcttccagccctggcctgaggtcctgagggctccctggagggggcggcttcccagcacccagcgtttaacagggccctttcggcctccctgtcccccaagctcagagttggggtctgcagcaggggaaagaaggagggagactgggcagctcaagttccccagaccgcacctatcagacggagggcggcccgctcccgtcagagcccgacctcggcggacaggggaggggatgggttgagaagcgggagaaggccactagctggaaactccctgacgacagggacaccgttctcgccccagccccagcgctcggcctccgcagagccggcccaacgaaggaagaatgaaaatatgaacgtgacatgatgtgggcttgagaggccgccttgttctttggattcacccagaaacctgactgaaaggaaagttactgcaactggggaaaagcacagttggctggagaatttggtttaaaaataaataagttttaaattacgtaactaacacgtgcttggtgtagaaaatttggaaaacatatgaaagtacggtataaaaatcctcgatcccactgccacatagaaccactattaacatgtcagaatcgtttcttcgggtgtttttttttcttaatgcatttatattgcatatacattttttctctaacaatatattgatgtgccccagtcccccacagaccctaatgtatgaatgggaatggaggcgtctgaaatgtgactcacaaagagttctctttcctccctaacaccccatccctgcctcaccccttcagcgcattcacagcagcactgggactccggactcagacaaatgtgcactgagctggctggtgctctcatagcctctggccccagagctccaccttcccctgcagagggggtcccgggagtgtcctcaagtgctccatgccccatgttcctttccatggcaccaaattcttctgacctccttctaggtgaggggtgagggggtgaggtagggggttggggaagagtgtccccatgaggcctgaggggcctgctagtgcaggggaggaagggaagttcaagcaagcaggctcaacggagggctccaccctccaggtacggccaggtcctgggagaaggaggggaagcagtctggtccaggagagaggcagcaagggcagatgctaagcctttgcctctgcactccctggggacctctggggacccccccccccacccagcactagtaatcaaaggaggacagacacctacacacgtgtcccatatgtctcaccctagcaggcagcgagaggatgcccagtgttactctggccccctggaaggctagcttgctctcctgggcacaagtcagaagcagtgtgaactggagtgggtggtgggggacacccctcccggtgagccccccctccgacccggctgtcagtgatccacaagtctggcccatcagccctccctgctgagcacacagtccactgacccttcttcagaattgtgggaatgacctcactgcccctccaagcaacgtgttgtgctgccgcccacatcagacatccggggaatggactgcacagcctccatgtgtgctggctccttggcgcctgcagagccgggttgattctgtctttcccttcaactcttgtcttaaaggatatcctgagcgtgccggctcctctgctcagagggtgttagggtggcggtggcagtgggcacctctctgctcctcggctgggtgctcagcctcgccaggctgcctggagctggtggagcaacagccttgtcccccgtccagctctctgcagctgccctctcctgtcagaagctcctggaaagcatttctggcacatagaggccatctgcatgttctcctcctgcccgccccaccccgagtagccacagaggatcttccccagctgccttcacctccgcccccagacagagcctcctggctactcccccagatagtgtctccaaaatcacttccatttctcctctgctcgcagccactcagtggctttcgttatcattcagaataaaaccaaagcgtccattaccatccaaccaaagaccccaggaacgcgctgcagtggaatcaagccacgtctgttgactggttgctgtgagaggatgttaggaaggacccgcaagtctcctcgtgttgggagagcatggtgggaggaggagttgggagaggctcaaggcagcagggctgactccacagctgggtatcttgataacttttatctagaaggcaggaagaacaaaatgcagctgaagctgaaattgatcaagcagcagcggtcattcaaattagccaggacggggtggtttggtgacccttgaggtctggccgatgctcatgttctgcctatgctctgacacgatcctgtgtatcttgccccatctcgggcacacagtggtcttgtctggtgttggtgttcagtgacattgcttagccatgaaattgtctccaggttagtgactagtgacgccagggtgggtggctcttctctttttcaagacctgggtgtcacctgacccccagctgcctctgactcacctgccactgcccttcttatccacactcttcctgacaagctggtttcctgtgtggccgaacagtttcctccttcgggcccttcgtggtcaccgggcccctgcctggagcctccgcctcaggaacccatgtggctgactccggccctgtggccttgccactctctctccatccccacgctgtccccttggtggttcttactgccaccttcctttccacctgctgaaaccctagggtcttctggtccctctgcccatctaagaccgaattcccacaacagggagagtctgggtgacacgctggtgcgtttattcctggggcagtgtggttcccacatggatcctcagatgttctttggtgttggtgaccccactgtggaccgttggttctgctccaagaccaaagctggctgctggtgggtgcagaatgcgcatgtggcttggaccagacagcctctaggcctcccctttctaccgccaggtgccgaagggccagcagcctggacaccccggagccctggagagctctgaccccagcctctgccccacctgaagtgggtctggccccttcttgcaacaggatcagcccccagctggagacagagaccccacagccagcccagacagccgcctagtactccccagtcccccagcctaaggacgctccactgtcctgggctgccaaaacaaatatcaccaactaggcacctcaaaactcatcctctggcagttctagaaggcagaagtccacagtcaagcggtcagcagagctggttccctctggaggcttggagggagagtccgtttcacgcaccccattttgcttctggtggctgctggcaatccttggtgtcccttggttcagagacatcgctgcaacttctgcctctgtcgtcccgcggcctccttcccaagtgtgcagctgtgtcctctcctcttcttaccagggccccagtcactggacttagggcccaacccaatccagcctgacctcatcttaacttgattacagttgcaaagaccctatttccaaataaagccctagtcacaggttctgggtgggcatggatttggggtgacatattccacccaacgcagctcccacccccatgtggtggaagcccagggtcagggaggatccccgttcccctgctggctcccagtgcgcttccaacttccaaggggggctcagtgggtggtctgagctggacacaacctagctccttcattcctgtgaagcatcgttctcacgggccgtctgggcagcaggcatttactgatgtttggagtaatggggacagcactttacaggtgacaacctggggcacctcttggcagctgggtgcctccctgtgacctcagctgtgacctcagcagtgacctcagctgtgtctctctgcccttcttgaccccatcacctcttttcttcccctaactcctggttccatgggctctcacctcctctctcccaggatgtctgagaaaaccacagtccctctcactttttgtccaagcagtccagcgctctctgcccttcaccttctcctccggcctggacccctgaaggcaagggagagggtagagatcacctctcagatccagaagatccaaaaacacccctggggtgtaggagtcatgctgattccctcggctgtgaagcagtgcgttcttatcgcaaagagcacttctgtttttttcttctttctacatctgtgctaacattctgtgattcttagagaacgaaaattctgaagagcaaagcccagagccaagaatgttcaagccagaagggatttctatgaggaacaaaacagacaaggcctctgcctgcagggtgcatatcccgagtggagagatggggctgtacagacccagagagcgtggctcgccctggaagggaaggtcaggtgcgacgggacagaatggccaggaggactagtttatactagggggtgagggtcagggatgagcaggatttagtgaagcaaatgatttcaaacatcaaaagcacaggaaataaaaggaatatagatcagacctcatcccaatgaaagccttctgtgcattaaggacactatcaataaagtgaaaagacaacccatagggtgggagaaaatacttgcaaattatctaccagatcagggattaatatccagactatataaagggcttctacaaattcactaactacaaacctgatccaaaaggccaaggatgtgaacagacatttctcatgaggagacacacaaatggccaatgagcacatgaaaaattctcaccatcactcaccaccaggaaaatgcacatcaagaccacaatgaaaggccgggcgcggtggctcacgcctgtaatcccagcaccctgggaggccgaggtgggtggatcacctgaggtcaggagtttgagaccagcctggccaacatggtgaaaccccgtctgtactaaaaatacaaaaattagccaggtgtcgtggcaggtgcctgtaatcgcagctaatcgggaggctgaggcaggagaatcgcttgaacccaggaggcggaggttgcagtgagctgggatcacaccactgcactccagcctgggtgacagagtgagactccatcccaaaaacaaacaaacaaacaaaaaaacacaccacaatgaagtaccagttcacacccattaggacgactactgtctaaaaaccagagaatcacaagtgttggtaaggatacggagaaatcggactcctgtgcactgctggtgggaatggcaaacagtgcagctgccgtggaaaacagtttggcagctcctcaaaaagctaaacatagaattttcatatgacccagcaattccacttcagagtatatactcaaaagcaaggacaccaacagacattggtacacatgttcttagtagcattattcacaacagcaaaagctgggcatgacccgtgtgtccctcaacagaggaatggacagacaccacgtggtttgtatacacagaggaatcttattctgctgtgggaaggaatgaaacactggcgctcactgcagcacggatggaccttggcaacaccatgccgagtgaaagaaaccaggcaccagggcagactgtaggattccactgctgtgaggcgcccagagcaggcaaacttgtaaggagagaaagtaaagtagaggttcccaggggctgggctttggagtggaacagggacttagttactgcttcatggggacagagtttctctttgcagtaatgaaaaagtttttgaaatagacggcggtgatggttgcacaacattgtcaatgtcctgaatgccactgaattgtacacttaaaaatgggtaacatggtaaatttggtgttatttctatttaccacaattttaaaaaattagtactgtactataaaagccatggaatcgcacgctttccataggtgaattgcatggtttgtgaattatgtctcattagaagaggagcatttaaaagaaagagggaggccaggcacggtggcccacacctataatcccagcactttgggaggctgaggcgggcggatcacctgaggtcaggactttgagaccagcctgaccaacatggtgaaaccccatctctaatcccagctactcaggaggctgaggcaagagaatcgcttgaacctgggaggcggaggttgcagtgaaccgagatcacgccactgcactccggcctgggtgacagtgagattctgtctcaaaaataaagaaagaaagaaagaaagaaagaggggcagcagcccccacatgcagcccccatgcaagagcccccaaggagaggcttgatgcatcagaggtgctgggtggtctggcaggctggagccaggccactggggagctgggagcagagggaagtgtgtggagggcagccctgccccgggttctgcagcagcccccgccttgtctgcctgcactgctctcggctggttctgtgctgagcgcagcctctccttggaagccaattttctgcacagtgaaatgttttttttgtgcccactttagcagatggccccccaccttggcctgaattgggaagcacagaaatgcagcaggggacagacggcttctttggcaatgtcttacaggcacacgagcacgcagactcatacccgccccccacaactcgccttcacggactctgggctgcagccggcctccggagacctctcctcttctgctgccgaccagctgctggacgcctggcccaggtgcttgcttgggatggatgcagatgactgcatgtctccaaggccgggaccggggcgcttcctctcctgcacccgcccctctcggccagtccctccactccccctaatgggagaatgctgaagggatcctggcagggactcctgacctccagtgtggagaccccgccccaggcacctgtctcaaccccatttacagggtagctgagaaacttctggggagacagcctgaccttggcccaccactggagtccagaccttaaacccactgtggtcagtaggcaggagtctggcctgaggtttgaggaagggcaacagagtctccagtggggaagtcgccattgaggaaaagtctagtgaaagcagatcctaggcccacgggaccaatggtgtgtcagggccgagttccagggccagcagggaggagggggctggtgcagggagggttggtagcctccacagagggatgccaccggtcctcatgggttggagccagcccttgggcaccagagagagcctgaaggggctacagagaccatctgatcctaccctgttgttctaattttttttttttaaagacggagtctagctctgttgcccaggctggagtgcaatggtgcaatctcggctcattgcaacctccacctctcaggttcaagtgattctcctgcctcagcctctggagtagctgggattacaggtgcttgccaccacacatggctaatttttgtatttttagtagagatgggatttcaccatgttggccagactggtctcaaactcctgacctcaagtaatctgcctgcctcagcttcccaaagtgctgggattacaggcgtgagccaccgcgcccggccctaacctattgttctgtgctggggtggggtggggaagatggaggcttgggaggccactgcccactcctcatgtgaccaggtcagtctcaggaaatgtaagtgtccttcttagaggaactgggagacaaagggattttcaggtttcgtttttgtttttgagacagggtctcactctgtcactccaacacacctcagcttgcagctgtgtccctccagcctctgactccatcatcacagggccgtctgtcttcctctgtgtctcttcttttttaaaatttttttgtttttaaaattttttttagatggagtttcactcttgttacccaggctggagtgcaatggtgcgatcttggctcaccgcaacctccacctcctgggttcaagcaattctcctgcctcagcctcccaagtagctgggattacaggtgtgtgccaccacacccagttaatttttgtatttttaggagagatggggtttcaccatgttggccaggctggtctcaaactcctgacctcaggtgatctaactgccttgacctcccaaagtgctgggattacaggtgtgagccaccacacctggcctctccttttcttataaagacaacacatctgcaaagaccctgtttccaaatacagtcaaattcacaggcaccatggttaggacttggagctgtatttctgggggaaacagttcaacccataacaaaccaatgtgggggtactttttttttgacacagggtcttgctatgtcacctaggctgaagtgcagtggtaggatcatggctcactgtagcctccacctccctggctcaaggtatcctctcacctcagcctccacagtaggtgggactacaggcacgggccaccactcccagctttttgaaactttctgtagagatgggggtctcactatgttgcccaggctggtctcggactcctggactcaagtgatcctccaacctcggcctcccaaagtgctgggattataggcatgtgcttccatgcccagccgatttccaggttttaagggtcaaactgttggaaacatttatttaaaaatccagtaggagggaaatgtgtgaccagtgagtgcagagggagtctgtggcatttccaggaagcaccccaggccaggccttgagcatctgggagaggaaggatgttcaggccacggggcagacgtctccacaagccgaggccacagggacttagctgtgcgtgagtgtgggtgtgtgagcagccagctcctcgagctgaaggagctcgtgtgccagcgagagggtgctgctggggatgagcccacccccggctacctcgtagggaatgggcacagggagaaagcaggactccctcaactgggatgcccctgctccaggagcccacagctgggctcaaggccgtacacatgcccggcttcctggagcaccaaagacaggaagagggcagctgggggacctggagccggatgccctttcccaggataaatgtagggcttccagaggccttgcatttgcagggggccactttaagccacatccccagaccttccagggcttggtccagcttcccctgctgctgcttatgggacctgggtgggggatttgacaagtcctggagcagctcagtgggtggggagggagagatccaaggacaggtggcctgcagtcctgcgtgggggcgggggacgcagccttcaggagctgagaaggggacctccagacatccggagcttcctggtatggatgacatgggaggcactggagtccgagggctgcagctggggtgccccatggcccaacctgaaggcaacatttcccagctccccttggttctttggcatcccaggagggactggtgcatggggaggggcctgtgggcagtgggggcggcgtccggccttcaggagaggaacctggaggagggtatcctggcatggcagaaggtagtggggtctgcccccaattgtacctgctcgcaccaggccctgtgcatatagctcctcatcccatcttcacggccctgagagagagtactgccagccccacagcacaggtcaggaccctgctgtttagccaggccaggcgagaacactgagctgggagtcaggaatcctggattctgatttctggatgtcaagctgtgcaactctgaatgagccacacagcccctctgggcctcggtcccctcatctgaacagtcggggagacagactagacgaccctcaaggttctccaggcccagacatcctgcaggtcttggacgtagcatctctgtccatagcgacagagacagaagtacccgccatgcaggcaggctgcccctggcccagtgcaatttgaggaggctgctgcatgggggcagagctggtgaagactgagggacccccgtcttcctgtgttgggacagatgggcaggagctgtagctcaatgcaaggaaccaagcatgaaatgacagaaaaagaagagacgggagcgcaaaagaaaacttgccgatagtcagagccgtctgaaaataggacagactacctctctggggtaatgagctccacatcaccagaagtgtgcaagccgagaacagtttcaggcacctgagaggctgctgaagttaatgacttccaagacaccctctggctttgacttcttgcgcccgtgtcccgctgcccagactcccacctcactccaccgagctgcaaggcccgtggcttctttccaagcagctgttcttagctccacggccccctgaaggcattcatggatgagccaaaatcaggcgtgagaagtgcagaaagtactttgcatctaatgatagttaagaacccaagtgtttgaatgagctctcacatagagattagaaatgtatgcgtgacgttatcacagacgtaactctgcactttcttgagtgggaggtgtgaggcggtgtgtccattggagccactggaatcgggcataaccctgggcccgaccgtgagcgtgcaccctggggtgaacaccacccagcgagaatggctctgggaacacaggccaggggcctcccgcctggcagggcctctgtctcccgaccaaggctcttcctgcagggacacagggggttccctgcctgctttgctgaggccaaaccttctccctccacaccatcccaggtgacaggtggctcactcacacccactaaacccccgctcctgagtcctgggaacaccagagcaccgggcagagaatccccgggcgatgccaacaggaagccagagtgaccagtcccttccgccaacccagtgtgtgtgtgtgtgtgtgtgtgtgcatctgtgtgtgtgaggtggggggcaccaaccaaaccaccgggcaggtgattttggctccatgtcccctgacttcaggttgtaagtgtgctagaatcactcaccccagggcacttgggtcctggttactctgtcccttggaaggaacagctcgcaagctccaaacacatccagagtcaagccaggtccacaagggggacagggaagtaagctcagcccaaggcccagcgttcccatggctatttatccctttgtagggacactctcagacactctcagacaagtgcagggaaggggcctgggactctgaaagcgggaaggcaaccacacgtggctaaggccccgctagcagaggctgaggcagagaactgccagagttgcttgggcacgacaagcccgggccacctcgaacccggacccagctgtggaccgcgagtccacccaggaggggaaggggaatgcggagtgaccccacatcccaggccgagtggcctcactgagttggggaaacactgggccactctctgcctctgcgtcagctgcccctgggaaatggagacccctccacccaacatccagcatcaccagacggtgtggggttgtcaaagggcacagggcaatgcacaagcgaggcacacaccccctgcaggtgagggtcacctgcacctggctggggaagaggggtggctgcagggggaggtggcattggcaagcctcggaaaagaagagacatcctgaggagaccacagtctttctccactctttactgtgtaaaaataaactcaacaattcatgtcatttcagcaagaaaatgaaaaaaaaaaaaaaagcaagaataccagtagaaatagtgcatttccagaattgctgatgggaggtggcaggtcccatggttttgacccatttgatacccaaaaggctgcagatcatatgaaaaatgtacagctttggttagcaaataatgaaaaagtgagatacatcgattctctttcatattatacagtatatacattataacaatatcaaccatagggggtttgctttttttttttttttttttttggcaaatgagacaaaattgggactctaagtattgggctttttttttctcttcaatgacttgttccctttcaacaaattgcacttcagtccactgtgtacagaagtaatacatttcccatcgttagttgaataaatttacacactgtgtttaagagatgaaaccacgacttcgtcaagccacatttggttgccataagattccaaaggattctatcctcttaatgtgaaccacatgtaacccaaggttcttctatcaaggttagaactgatattcaaatcctcggctcattccacttagtaagtcagctccaagacacaggttcaccataaatggccagttttacctcctggtccccaacatgcttttgagaacaggtggcccctctttggagctcactggaatgactgaacctcatgccagcctctcctcaccccctcactgcccacaagacacccccttggtctcaggtcccagggctggtgacaaagtgatctttgcagtcttagaaaataaactgggaatctacaaaaggaaaagaaagcatacaaaatgtatctctttcttccaaaatacatgctttcagttctacgttttggtggagcctgaaagtattttcaagggagatataggttgagttaatttataggtttgtccttttctttcataaaaatactcttgtttggtaataaactttttcttctacagtaagagaaataatactgtgttatcaaaagcaagaaggcttacgactcaagtgggatctaagcccctgagggcccggagagcttctgtcaacagctctcccaccccggacacccagggagctgtcggacaccagctcggcaaaagcaaacactgcctcaacagtgctttttatcttcttgttttataaaatggcttacctgagagaggcatgtattattcagtgcaagagggaacatcaatcagattaaggagtaaatgggaactacgtggattagatttgcggctgtgtcatcgacctttctcggggccagcaaagtgccaagtgtcaacacagtgagggagtcgaggggcttggctcagaccctagcaaggggcaggagggagctaaaggtcagcttcggccctggcaccatgggtgggtcagaggaggggtgaggaaggtgagcgggccaggaggctgcaggggtggaggcgtaagcactggggtgtgctctgcccctcgctagtcagggcagaggatggctcatggtcctgaacggacagctcccacctggcccacgggggcagaaggtggtctgcggtccagtagatcggcaggggcggggctggccggaggtgctggcaggggagcaccccacacagcccgcaccgggcgttgcctacacaagggctccgagatggctggagtgagggtggggctagatctggtctagagaggcgactccaagctctcttgctggctcccagctgtgggaatcctttaggcttgttctcaacctacacgttaaaaatgcttcttggtgtgtttggggagggggagagggaaactgagctctctcttgacctcctccaacacccttgacttgcttacccagccattttcagtagctacacgggtggtcacagaacactgggcggcactcggcacacaacacagaaccggggcagtccatgcaggtgcgggaacacatgtcggacccagggagcaaggaacacgccaccccgaggaacatgcaaacggagaagatccctgcagatccaaggatgccacaacccgacgggcgctgaggaagcacgattatctaagaaaaagccactgttgaacaacaacgcgcagcacggcgcctgatctgcacccccctctgcgggagtgatgcattgcagaacggcggccgggtaccgtgcagacacccacgagaacactgacacagagacactgacagacacacacagatgcactaggttcttgacacaacgtggacctgtgtttaaggggacaggtggccctagaaggaacagaagacagaaacacctgctcctcctgcagaaatgtctgcagctgcagctgagccaggcagtgcagtagaatttctagaaagacttgtcagcggtttgctgatgagactcctggagacagagtcggggtgccctcagggcgtgcgaccaccagatggtgcaaagcaggaagctcctcctaccctgggcagggcctcccgagcctgctctctttctcacttagcgcacacacacacacaacacacacacacacacacaaatgcacatacacttctctcccctccttggaaggactagaaggaaatgtccatgttgcttttcacggggaacaaaaaaaggcaaaaaggttctggacactgctcaggtgtcagtgtcgccggccagtggcagcttgtgggctgctgtaggccgtgagccccatgagatggaggagtgggtttcaggcccctgccctggccaggcctggctccacacgtgaggtctctggagtacccctggaggggtctgaaccagctcacctggcgcctggtgtgctgggagggatatggctgtcaaagtcccccaaaaaggaccttcccaccgatgggctgggttgaagtcccagtggccccatgtggccaggtcttcatcgaaacacggcttctttccttaaaaggtcccctctggtctgcactgccggaggccaaaggagaggggtgctggggcccggcttcccgggctgtgggtggcacgctcctctctcagggccctctgggctgaagcagtgcagcacagctccagaggtgagaagggaggggcagaccccagccttgcaggatctgaggaggtgggaaggtcgagggcagggccgtcctggggcagagctagctgagctgggcacacaggccgacctcccaggccccatgctgctctcagatgcaaacagcagggatggatgctgtctggccctggggtaagggccagtgtcctcagccatcccctctcctccacgggagagcacagggtaccatcccaggacggcctgccttcacccttcagagacagttcacttctattacaaaataaaaattctctgtagagagcccccgcccccggcctttgacaaaccactaaaagacatttattacatcaatataaagatatgtcgctctgagaaaggtttgcaaacaaagacaaatgcgtgtactgaggttgcaccaaccccaaagcacgcacgcagctaacaaagttggcaaatatgaattttcatcatgagatttttccaaagccagaagaaagaaggaaatgaggtacgtcctcaaagaaaaggcctcccccagccacgcacgcacacacgtagacacacacatgtagacacgcacacacagatcctctcaccaacttctgccttgttcaagacgttgcagcacccacttcagctgtgaatggggcatgcctgagagagtccgggctcctacagagaagtggggcttcctcagggacagatgggagcaggggctgcttcgtgtgcatgaggacaaaaccaggctgtgtgcgtgtgcgtgtgcaggggcgacggcctcggttcattcctggggaaaagggagagaagagacgcacaaaacagatcatcgccgcacaagcagggggcgagggcgggcgggctcagcctggcctgccgtgctcagttgatctggcgacaggcctcgaaggtccacttggtggcccctccgtagatctcgatgtgggattcagcccaggcgatgacattgccggacagagccttggtgctgcaggtggccaggttgtacacctccccgggggtcagcttgcggtcccagatgttgaagtgggccagctcacccacaaatgcctgggtggcatcaaacccaccacccagagtgtccttcagagaaaaacagaggatgagagtggaggggtcgccaggtggtctgggggcccatccctaggccggggatctgagtgcctctgtgcctgcccgatcacggactctcacggacactcctaggtgccgtttcgtctccctgtccctgactctccagccctacatccatccctcctctgggggagcccaagaaaagggatggcaccgaccacctctgccctggagcttctcctggggggacctggactctgcccctcctgcagctggtccctcagccatggacaaccacagcagctgggcctggggcccctgcccagacatcactccatgccagctaaagctgcccaacagggacagacgtccccgattctccatcccttcgtcttcctcccaggtgcccaacaggagacaaaccacttcacgggaactagattatgcatcactaaaagcagaactggccttcccatgccaaagaaagtgttgctgcagctctgagagcgttgaaaccagagctcactcctgcaggaagttcaagtgcatgtccacccagggcacaggccttgcccagcctgctccccgggctgcttctcaggggaaccacttctccggctacctccctccctccttgctcctcttccccttcccagcctctggttctgaagctctctccccttccccaccacatccagcacagtacctgctcctggcccagcaccagcacgccctggggcttgatggggtgatagggcgccaagttctcgccactgccaccctgcgtgccatcctggtaggcctcccagaccccgtcccgggtggtccaggtgacacagatgtggtgccacttgccatcattgatgacaaaaggcaacttggccacctgggaaggagaatgacagacgccagctggtgagtacaggggtacagcccagaagccataatcttcactgcctcagttgttcctatctctacttgcaaagtaaatgtcaataactattactgaattctcacagcacctactgccccagacttcagcgtctgtcagccccgcctgggcgtggggcacagaatcacacaggaaatgtaaggctctaccgagggaacccccaagggccatgtgggtgtgcagtctcttcactcctactcaccctcctccctctttgctagtctacacaacaagccctagtctacaccagggagagccgtccctggtgtctgagttcactgctgcctctcaaggctccgtgcgacatctgtgcagcctccttgctggcctctcctctctcttccgatgtcccatctctagctgttacaccctctcactctacaacacggcaagcttttgccgaggatctgagagatgtcatggagcacgatgccttttaaagctcagaccagcctccaacctggaatttcactctcccactgccattccaggtcgggaggatgacggtccagcagacagtgaggaaagaaacttcacaccctttccgcttggggaaagggggcccagaatggcacagccctttgtggggaagagcaacaggaacaagggcgtggaatccacttcccagcccaggttttagccattgactaccactgctggcctggacttgagacagtttgaaagctggcagctagttccatagctaacaggggaggatggagaatgttcactagagggaaaggctgcctgtgctgtcctgttccaagggatcacacagacctgtcctcctcccgagagttagggggctgagtgggatagacttggactcaggaaaaatctctaaggacccctcaccccgctagagcatctctgggtccctgctatggaggggcaaagccagttccaaggccagctggtggaggagtccagatcacatcatcgggcagggccaggccccatggctcgttctccgccatctcccgtacccaccccaggaggcatccgggaaggtccagctctccctgctctcccagtacaggtgagggggctcctaccacttctcctggtcttcaccctccccctccctcagtcccacctggcaaacactttccttggggccccatcaacatctgaggccaccatagccctgtctccgcatgcaacatgagctggggccctggggcctcgccctgccgccctgtgagcccgggggctgctctaccttgtcattgatgaggatctccatggggttgttgccccactcaatgaggaccagctcgttggcctggccgggcacagcgtaggagaagggcgtgcccacacctggcgtggcgctggacttgagccacatgcagacagtgaaggcgtacatctctggcaggctcttcttcaccttggcatacatatagttggtccgcagtgggaatgtgagctggaacttgtctccagggcggttgtctttctgacctgcggaagacacagtcctgacatctgcacctgcgtgaagtgcttatcggtgtctgagttgagttcggtccccaccaagctctgtgatgcgtggccagggcaggctccggtctccattctggagacgcagagcgggtagcttcccaggtcaagtactttgccccaaggcacagggccagtctgtaaagagctgacccaagctcttcatgctccaggtctggcctgctgtcacgcccatgtgctggcatccttggggagatgggggtggggggcagtgcctggtgggctgctgcatcaacactgggctgcgtggtgggcatgagaagggaatggggacagccgccaagccaagtcaacccaaggagcaggggtggctgcagaggaggaacgaggctagctaccctgagagtaaccgacctgattccaggatggggcggggctcagagcctctcctcgctcaatcccaggctctgctcctgcctctccccacccgacagccaggccctggtgcccacacacttccctccaggccagatgtgcctctgacccaccaatgcctcttgggtgtgaggctgggcagctccccacctccaaggcccttccttggagcagggactctgcctggagctctgctgagagggcagggcagcaaggagctgggagtactctgggcgccagggctccccaaggtgactgctctaggatgccgccacactctcaggtgagtaagtgtcctcacagctcaggttccaggcctggtggcctccctttccacaaggcccaccttctccctccccaccggccacttctcccgtaagcgccaacccccatagcccatctatatactgtggcaccctgggtatggtgtgactgactccaggcaaaacattcctggccagcaatgggcacagtagcaggcccagagcccaggaacacacaccccttggtcaatccctgggtgagcagccgtggtcctgccaggaagcccagaaagaaaccagttccccaggccaaaaattatttctagaagacatcctgcccggtcagcaaccaccccctcctctaaaccaactggcagggagcagagcagggcaggccccctcagtgcagcaccccagcggctaccccaacccattgaggcctgcagtgggggatagggaggggcccagcccctggcctttctccgggtgtttttcattccccaatctccgctccttccctctccctccctcctgaggtccttccttctgatctgtttttcagttacataacaagccttaagatggcactgtttaaatctgtccggcacattttgcggtctgagcagggtcacgtggccttgctccgcaccgggcacccccccccctccccttttacaaccttgtttgatttctgcgacttcaagacagagcctccagcgctcatccaggcgccctgggtgatagactggctggcctgagttggtgactgagaaacctcagggatttgaaagatgccaggacttgggtcactcagaaaagaaaacctcagggtaggggttcaggacagaagtggggaggagctggagatcctgagaggacaccgggggcatggcagccgggaagaaacctgcttaacagcctcagcggcccggggaacgagagcgcccagccccagcctgcacccagctgtacgctgaggctggggaccagggagagacaggctttcttaagcagggagggtttgagccagcgacagccactgtgcaaagttactgaggattaaacaaatcagacttgaaaaatccagcgagtgtgtgagtgtgtctggatgggggagggggcactatgcaatcccctttcccagagacagccccagcccaaggcacccagccctgatagaaacaccgactagaagcccagaacctgggaaggggtgcggggaatgagaaagcggtgcaggggttgggggtagcggagcggcttgaggcttgcacagtgcagagctgggctgttagggatcgggaccgaggcagggtcgggcaagcaggtgcaggcaggcagcacggctccccctggccccagtacctttctcgagctcgctgatccgctggtgcagggaggtcagggcggtctcgatcttgaccctctcctcggtgtcgttcctggggccccccttgccctcctccagggtgttcacccgggacagcacctgcctctccagctcatcgatcttgctctgcagcagatccttgaggctgttggtctggctggaggaattgaggcggctgtactgctgcggggtgcaagggcgggggaaaccacaccgttaggcgaggcgcggggaccgtgctggaaggcccgcggcgcggtcccctctgggcgactgcgggggcggcctggcagggagctggggcgagtggccgccgcggggcctcgcaggcgcggggaggcaccggccgggcacccgcgcggctgaggcgagggcgggggatgcctggccgggtagggaacggggtgggggagggcagaggggcgagcgagccggagggggaaccggagccgagggcgcgcgcggacctcgaggttctccaggcgggttttgagcgattgcaaagtttgcccgagttggctgagcgtctcggcggccggtgtccgggacaggtcgcccatggtgttcttgcccgagccgggctgcttgcggccgccgcccgcccgggcctcgccggctccggggtccagcgtgctctggctctcgcagcggcccagcttggcggtcagctcgcggatggtctccttctggctcaggatggtctccttctgctgcagcaccgtctcgcggagctgcagcacgctgctccggagctcctcggcgccgccggcggccacggacgcggcgcacatgtcggcgtccacgggcaccgaggtgcagatgaagcgcgtcggcccgaaatcctgggccccggcgcccaggaggcagagggcgagcagcgcacaggtgcgcgcggcgcggccggccggcatggctgcgggcaccgggcgctccgggcccggctcggctcggctggggctcggctccggctgggacccggctcgggctgtggctccgcgagcggcccgcgctctgggcgccgcgctcttcggccgcgcggtccacaccgccgcgctatcaggcccccactgccgcctgcgctgcggagcccgcgccttttatgccgccgcgggaggggcctcgagccgccgacgtcagcgggggaggaatcccgctttaattgtccgcggcccgggcccgcggcgcggcgggggtctcacgagcgcgccaccggggctgcctccgctcgcgtcccccccgcccttctgggagctgccgcggccccctcctcccccgcccccgcctgggccggcgctgctgccccgaaggctccgagagctcagggggaaggaagtcgggctccggccccggactcgaggatggaccacctgcgtggtgtccccgaacctccgacggggctccaggcgggcgggaaaccaccgcgtccgggagatagaattcggttcggccctcctggctgcactgaacacccttgggccggggtcgtttggagccgggctgggtgcccaaggacccaggtcgtcaacacccgagtgcccggtggtcaacggctcggagtggggcctcgcggcgccactaagtccagagcgggggtcaccgggccgccccgcgtttcttagatgtccgtgtgctattgagaagccgccgggcagcctgggtacagggacttcccacgggtcggggcccccggcgcctcccctcccccagctcccgggctctgtggacccggccccgtccccgggggactgtcagtccccaccccgtgcgggcggggcgctggggacttctcggaggcagacctagctgatcgagcctttcctgtccgcggcgccggcccgatcgcgggcaggcggcgtcgccggggctggacgttcgcagcggcgcttcggaagggggccccgcgggagcagccgcccgcgtctccagcagcttccccttgccaggcgccgcgcgcgcccggtatccccgggtgtccacctgtgcgtggggggctgtttcccgtctgtccagccgcgcccacttctcaggcccaaaggccagcaggaagggtcccggaggtggctgggggcgtccacctgagaagctccgctctcgctcagacaccccacccggcacccgcgcactcgcgccttcatctggaccgcggggctcggctcccgagatcgcggtccgggttccggcgccgggctgggggctcaggaccagggctggcgcagccgccccgccccgccccgccccggggctatcagagcggtcaaagcctcggaaatccctccgtccacgctcccgtggtacagagaaggaaactgaggctccgagactgcggggccgggctacagccgtggccccccgacccctccccgccgcccccggcttctctggtctctgcgttctgcagcctttccctgcgcgcagccgggggctgggggtccccagccagcagggacccacgggcagtcccgggtgccgggatcgggcgtccgcccctcgggcgggagcagaggccggctcgatggagacctttttgagaaatggcggcctctacccgccccccagcccccgagcgcccgccgtctgcgttcagcatctcagcttttaagcctccctgagccggggctgcgttctcgttgtctccttcggccgccgcttcctggcgccagagggaccccgcggcccgcacgggcctgtcctcggctccgctcggagggtgtgcgggttcccgctccgctggccccgcttgcccaccacggcgcgcccaaacccacgcggcccgcggccccttgcgtgctctgccgaccccgggccgcaggaggggttagcctcgccggtccccacgcggggtctgcgccggcagcgccacgggctggaacgcgcctcgggagaaattacccgcgcggggtcgcggcgtcttctgccccaactcccgtagggagccgctaggcgggtgccctcctggccccagcgctttggcctcgccgccctcccgcacgcgtccagtggggaggccgcgcccgtcaggcctggagccggaccgtgcccagccgagagcgcgcgggcgcgggagaggagccctgccctgcccagggcaggctgtttagacggggcgggaacccttagcctggccccgcgtctctatccccagcagccgtggagccttcctagccgcccaaggccagggaccctgcctggcttttcctccagggcagcagatctcagcggcctggcacctcggcacagaggagcgtgtcccccttccgcagaggaagggagtggacggcgtcagaaagggaggggagcctggggcggtgtctggggctagcgggacctctgggcactgtggggccccaggagaggagaccctcgggtccagcctgcaactgttgtgcaggaggcgctgggcgggacacctgcaggcgctgcacacacacgcgagggccaccatgccgcgtttctccttcacaagaccctgggcaagcggagggtcgtatttaggattccctcggcctccccagtgttctgaaagtatctgagagggagggagcaggaaaacgaagggccgccctgcccaaactcatcggggtgtctggttactaggtcggaagaggggggatggtgttgtgaacagccagtgatcccggccctgcctgagtcccacaccccagatgcagctggggtgagggaggcgatcccgtaatattcccagccgcgtacatttgtggctgcctgtgacacgacctcactcattgggaaaccatgcacactagcacactgttattttatttttgagacagggtcttgctctgttgcctaggctggagtgcggtggcgcaatcacagctaactgcagcctcgacctcttgggctcaagcgatgcttcctgcaccaccacacttcagctaattttttttgtttttttcgtagagatggttgaactcctcttgccttggtcttgggactacaggtgcaagccacagcgcccggcctagcacaatagtacttattatactactcccaccataacggtgcaatagatgtgaataaaactcaaaagcatagacaaggctgggcgcagtggctcacgcctgtaatcccagcactttggaaggccaagctggatcacatgaggtcaggagtttgagaccagcctggccaacatggtgaaaccccgtctctaccaaaaatacaaaaattaaccaggtgtggtggcacacatctgtaatcccagctacttgagaggctgaggcaggagaatcacctgaacctgggaggcagaggttgcagtgagccgagatcgaaccactgcactccagcctggatgacagagcaatactgtgtctcaaaaaaaaaaaagatagacaatagttcaatgtaagaaaataattagaaagtgatgagtttgtagtatttattgcccatttaaaatataatttatttaattataagtttacttagtttaaaatgtaatagtggctgtgtttaaccatcgacctgtgaaattcctgcaaatgccaccatcagtgggtactggccggctcagctcactcctggtggaagggcacggagaggcctgcagaggttagttggtagtgggagggggagtgtagagaaggcaaagggggcaggtgtccaggagaggccctggttagtggccagtatggagagggtggccaggcataagaagactagacagaccgggtgcaggggctcacgccttgaatcccagcactttgggaggccgaggtgggtggatctcttgagcccaggagtttgacaccagcctggacaacatggcaaaatctcatctctacaaaaatacaaaaattagccaggcatggtggggtgcacctgcagtcccaactactctggggactgaagtgggaggattgtttgagctcgagaggttgacgctgcagtgagccgagaccacgtcactgcactccagcctgggcaacacagcaagatcctgtctcaaaaaaaaaaattttaaaaaaagaaggctagccgggtaggttgggaggtattaagaggacctcagtgcccatcaagagtctttactcagtggacggtgggagctcatgcaggggtgtgcctaagcctggtgggtgcctgtgccccttgctcatcctgccgtatctccccggcctctcatcttccaggccatgccttgagcttatctggaacctccacccttagcaggaagaagggtgagcaatgggtgggtgctgggagaatgctgggagggcctgagagcactgcggggtgctaggcagaggcacccttctctgccccacttgcctcagcccttcccgcatgatgttccatgctgcctctggaggggtgaggctgggaggggagggtatggtggggtgggagaggccctggtcccccacccgcagaagagaagcaggagccctcgatgatcacagccctgggatagacacagtgcctcagccaagggtcaggtacatgcccctctggaggacaggctgtacccctcggagactcattgcattggcagctggtctaggatgtgggacagtctgcggtaaggtgagtggccggggttttagtgtgtgagatgtgcaacgccattttcacctgcatctgagtttccagcagctcgcagggtaccggccatattgtttctctatctgggtgctgatctcatggggtgtttgtcttgtgaccattcactgggctgtccaggtgcaatctgtgcacctttctctgtggttctatgcctcacacagggtgtgcagggcacagcatccgcagggtgtcctgggcagaggagaggggcttctggccgcaccaggggagaaggcacagggacctctggcagcccagccctcaggacacagtcaggccacgtgaccttccccccaagtgaggcgcccctggacccacagggttgggtgtggggctgctctgacggcagccagtcccacggggcctctgagtcacagcctcagcccacctgtgccttggagtcactcctgacagccccacccaccagctctgtgtgataagggacaggtccctgctccccggctctgctgagggaggcgccccacccgagccttcccctctgtcctctacatgacacccctgcggtggtaacctaactgtgtcttaaaaacaagcacttgtcccctttccaagtcctgggtccacattcacgcatttgcctttcaaaggcacagctgggctctagtcctcgctcaccacagaggaaacacagggaagcccagagaagccaaggtcgcaccgtcgcccagcgaaggcagagctggggccaagccctggccttcgcactccatgtggccactttatctctgcccagcacaggagctgcaaggaaaagactccaggagaggagccctgaggggacagtgccccagcccacccatgtccagtgagtgggcagggcaggtggggctgcggaccccaggctcaagaccttctcaccagccatcttcagaggagaagccagccctgcctcaccgcaggactacgcgcttctgcccactatgcaagtgtggcgaagcctgcagcagctgcagccaggagctgatgggccggggcagtgccccattctcctgcgacagctgagctcccaccccagattccctgctcccaccaggggcttccccacagcaaggaccaccttcctcctctgagccagccaggcggccactggcccagtctggctggggacagggccctgggtggtctctgtccccaccctgcctgttccttctcttgggctgagcccagtgctggggtcaaggatggggaatgggtgctcttgaactgctgactcactgatcccaatcaacaggagtttgcaggggaaaggtgagcccttcccacctggggaaggcgtgtcttactctccaagtaggcatttcatggcaccaggcagatgcttgggcatttgccatagtgtaactgttcagaacagttgctctcagttgaacaaatatttccagagcatccactgaggggcagaccaggtgttggggccaggatgagtaaaacaccattctccgtctctgaggccaggcgatctggcaggctagacagggctgaacacaccttgggtaccatgcgtgagggccacaggacgggagaggtcctgagccagcaccaggcgcatgggttagggtccagccatcagctggaagggtctcctgtggaggtgataacaggggcttgaagagtgagccaagggggctggcactagcaatgccagagcaatgaggggcaggccgtggggagacggacgtagttcatcctgccaagagtgagctgcaggggccagggtagatgtgggggagttgtgggcaaggtgggccaggaccttggggagaacccacagtcctgtggaggcgctgtctgggagcccttggtgagggcggagctgagcaggagcagggcttgcagaagagacctggagggtgatgtcacaggagccagggaggaaggggactgggcttgagaggcttgagggcatttgggagattccttggcaggggcttggtgatggcttgggcgtgggaagtgaaggagagggaggaacctgggaagatccccggcttctgggcgagggggtggtggtgattctgcctgcagagaaggggtggggagcctgggagggcctggagggagggaggagtccacagttcacactaggacgcctgggttttccagtggctatctgacatccgggaggaggccagagcccagcacacggaggctctagagattccaagacgatgaggaggctggtcctgagctgacctgagcggaaggggcctgagggtgcagagggaggacggggctgacagcagagtcctgggagcatctttagaggccgtggaccacagccaagccagtagggagcccatccagggaggcagtgggtacaaaaacagaagaaagctgaaaagagcaccctgggactccgatattcaaggaccattgttttaaggtttctgatctccgcattcaacagtgacaagggcagcagacatcggtactctcaggcatttgtacagcaccttctgcacttcaaaatgccttccctgcacccccaacacagggcttgcaaatacaaagccaggtgaggaatggccctagggcccccgtcccagccctccccagtttgcattcatttggttcctgagctaggacgctccctccagctaccggcatctggctgctgaggtgggggccgggggcctgccagcctgctgtgtccttgcccatcaattttaccacctgcgagacgccaggagagggcacatgaaatataaaatgagttgaggcataaaagtgtttcggaataaaaatgatgtgtactggcaagagattacagttattacaaggaccgtgcgctgccgccatcactcatacctgggagaggaagagtgtggtcgcctgccgaaggaggcagcagccaccgtgcctcctcctctggggacagggccgcagactgcagggtgccaggctgcaggatgggctgaagccagccctccgggagcatccagtgctctgggggatgaatgacactcccatgtcacagttaggcacaatgcagggccgggcgccgtggctcatgcctgtaatcccagcactttgggaggccgaggcgggtggatcacctgaggtcaggagttcaagaccggcctggtcaacatggcaaaactctgtctctactaaacacacaaaaattagctgggcatggtggcaggcgcctgtaatcccagctacttgggaggccgaggcaggagactcacttgaacctgggaggcagaggttacagtgagctgagatcacgccactgcactccagccgggcatcacagtgagcctctgtctcaaaaacaaacaaacaacaaacaaaaactattaggcatggtgcaaatatgctcctttttctgttacattttccaaggtgtcttggacgtttaccagacggctttggcaggtggcattcttttttttttgagacgaagtctcactcttttcccacaggctggagtgcagtggcgtgatcttggctcactgcaacctccacctcctgggttcaagtgattctcctgcctcagcctcctgagtagctgggattacaggtgcccaccactgtaccaggcgaatttttgtatttttagtacagacggggtttcaccatgttagtcaggctggtttcaaactcctgacctcaggtgatccgcccaccttggcctcccaaagtgctgggattacaggcgtgagccaccgcgcccagccggcaggtggcattcttatgtttgattctgcccattctgcagaggagtcaagcaaggctcactgtatgttagtgccttggcctaagtagcaatattaattctagtactgcgagtctagccttctgaattccattcattcattcattcattcattcgttcattcattggatgaacattcttccaggcctactatgtgccaggaactctcccagatggtagagacacaaagatgtttccagctaattattattattatttttttaagacagggtctcactctgttgtccaggctggagtgcagtggcacaatctcggttcactgcagccttgacctcctgggctcaagcaatcctcccacctcagccccctgagtagctgggactacaggcgcatgccaccacacccagctagcttttgtattttttgtagagacagggttttgctatgttgcccaggctggtctcgaactcctgggctcatgtccctatttttttttttaagttgatggatagaattttcttggttttaagtttctctttcatgcacttttattaaaacattggcatctgttatccgtaactacattaagatccctctaagatagtatctggctgggcccagagtaccaacattgaatgacctgtggtttcctagggcaggatttcgtgggattttgcagagagacccctcaccccggctctgggccaccctgaataacaatgtcaaaaacgatctggtgggcaccctctggagcagggtaaggtgagttgggagagaacatggctctctgcagccagactcagtggctcacacctgtaatcccagcactttgggaggccgaggtaggcggataatgaggtcaggagttcgagaccagcccggccaatatggtgaaaccccatctctactaaaaatacaaaattagccgggcttggtggtgtgtgcctgtaatcccagctactcgggaggctgaggcaggagaatcacttgaaccagggaggcagaggttgcagtgagccaagatcatgccactgcactccagcctgggcaacaagaggaagactccgtcttaagaaaaaaaaatggctctgtctgcaagctcaggtgtctcaacgtctggttctaccactaccggctgtggggctctgggcaagatgggaacgtcacaccagatggcccggggaggccccaggggagtaccctgctcacagtgagcacacactccacggcagctgctgttactaggatgatgtgatgttgttgtgttgttggtaggactaggcccatccagggagggtctcaaagctgggtggggagagctggcgtgccacttggggagcaaggagctccgtctctcagctgaggctggacgtctacctctctgacactgcaggtgtgtgcgccccctccctcctggggatatcatgaggatgaagcagaagcacgcattgtgtgtgtgcatgtgcagggggcagggtgaagaaatcttacaattttaaactgctcaggtgtctgggaagtaaagaaaagaaggaaggaatgaagccctccttttgggatgtcttggggtcacagagacccttttctgggaagatttttcatttccccatcttttttcatttatttgagacagagtctcgctctgtagcccaggctggagtgcagtggcacgagctcagctcactgcaacctccacctcccaggttcaagcaattctcctgcctcagcctcccaagtagctgggataacaggtgtgagccactatgcctggctaatttttgtatttttagtagagacagggtttctccatgttggccaggctaatctcaaactcctgacctcaggtgatctgcctgcctcggcctcccaaagtgctgggattacaggcgtgagctgcagcgcccggactccgcacctattttctgctctgcgtagggacagcctaatgcattctgcagcagggagccatggcaaattggtaacaagccggcccctggccttcatcccacccctccccgttctcagacctgccctgtcagctgacagtcctttgagccagtctcagctcacagcttggccttggcagtgatcatcccaggctctgagaagggctggcccctgctagtctcgcaggaaggaccctgctggctgtgtgtggtgtgcgccgcgctcactgacccctccgggccccctccttccacctcccttgctgcccttccgacgggtgagcggggagagcaaggcatgagcccccagcgcgttctagtccttcctgcgtggctgtttcctgagtgctgcccactcagcatgcactacccccccaggccaggatgatgctgggcacaccagggaagcagggagagaacctgtccttgcctttgtgaagggggaatcgtcgtaagcagggaatgattgcaacgtatgagagactgtggcatggattgtacctgtcacctctcggcctcacctttctgagcctctgtcggccctcaggtctatgcagactgcgcctctccctccccctcaccaggcagccaagcagccccttgcttcttcgtctgccctggggcctcttggacctcacctgcaggacgtgctctgcacagtttcctgcacacctgcaagtgtgtgggggcctatgcctgtgagccacccttgagcaaaggtgtaaagaccgaaggacaaggccccccaggcccctgcaagtgggtggttcatgagcttccttggaaggtcccaaaggacggagctccagccaccccagcagtagccagctccatgacccccgttcccttccactcctgtgtcactccctatccctcaggggaatgcagctaaagcagcagtgtctggggagcacccagcagggccgtgactcaggctggggatcagggagggactccctgcagaggtgacatttaagccaagctctgaagcaggaatgggagttgtccgggcaaagaggcatcctgggtgaggaaagcagcctgtgcaaggcctcgaggtaggtgaagctgcttgggagtagcaacggcagggtgggaggagtaggcagtggagaggatggacacggtggaggggagggatgtggtggagagggatggacacagtggagaggaggtacatggtggagaggatggacgtggtggaggggagggacgcggtggagaggatggacgcagtggagaggagggacatggtggagaggatggacgtggtggaggggagggacgcggtggagagggatggacgtggtggaggggagggacacagtggaaaggatggacacagtggagaggagggacatggtggagaggatggacgtggtggaggggagggacacagtggaaaggatggacgcagtggagaggagggacatggtggagaggatggacgtggtggaggggagggacacggtggagaggatggacgcagtggagaggagggacatggtggagaggatggacgtggtggaggggagggacgcggtggagaggatggacgcagtggagaggaggtacatggtggagaggatggacgtggtggaggggagggacgcggtggagaggatggacgcagtggagaggaggtacatggtggagaggatggacgtggtggaggggagggacgcggtggagaggatggacgcagtggagaggagggacatggtggagaggatggacgtggtggaggggagggacgcggtggagaggatggacgcagtggagaggagggacatggtggagaggatggacgtggtggaggggagggacgcggtggagagggatggacgtggtggaggggagggacacagtggaaaggatggacacagtggagaggagggacatggtggagaggatggacgtggtggaggggagggacacagtggaaaggatggacgcagtggagaggagggacatggtggagaggatggacgtggtggaggggagggacacggtggagaggatggacgcagtggagaggagggacatggtggagaggatggacgtggtggaggggagggatgcggtggagaggatggacacagtggaggggagggaagtggtggagaggagggacgtggtggaggggagggatgtggtggagaggatggacatggtggaggggagggaagtggtggagaggatggacgtggtggaggggagggacacggtggagagggatggacacagtggagaggagggacatggtggagaggatggacgtggtggaggggagggacacggtggagaggatggacgcagtggagaggagggacatggtggagaggatggacgtggtggaggggagggacgcggtggagaggatggacacagtggaggggagggaagtggtggagaggagggacgtggtggaggggagggatgtggtggagaggatggacatggtggaggggagggaagtggtggagaggatggacgtggtggaggggagggacacggtggagagggatggacacagtggaggggagggacgcagtggagaggatggacatggtggaggggagggatacggtggaggggagggaggagaggggagggacgcggtggagaggatggacacagtggaggggagggacacagtggagaggatggacacggtggaggggagggaagtggtggagaggagggacgtggtggaggggagggatgtggcggagaggatggacgtggtggaggggagggacacggtggagagggatggacacagtggaggggagggacgcagtggagaggatggacatggtggaggggagggatacggtggaggggagggaggagaggggagggacgcggtggagaggatggacacagtggaggggagggacgcggtggagaggatggacacagtggaggggagggaagtggtggagaggagggacgtggtggaggggagggatgtggcggagaggatggacgtggtggaggggagggacacggtggagagggatggacacagtggaggggagggacgcagtggagaggatggacatggtggaggggagggatacggtggaggggagggaggagaggggagggacgcggtggagaggatggacacagtggaggggagggacacagtggagaggatggacacggtggaggggagggacgcggtggaggggagggacgcggtggaggggagggaggagaggggaaggatgcggtggagaggaatggatgtggtggaggggaggaacgcattggagaagatggacacagtggaggggagggacgcagtggagagagacggatgcattagagagggatggacgtggtggagaagatgagcgtggtggacagggatggataagatgctcagcaatggacgcagtggtcatcggcgccttcttggcaggccacagggaggagtttagactgcgctagggcaagggggagccacacaagggtttggagcaggaactattttggccacttgatggagaccggatgcagtgttggggccagagcaggcagggagacccattaggaggctgttccggtgacccggtaggacgacaagcaagaacaacagtgggggtggggagaatacccccaaattgtgccatagtcagcttcagcatctcattccgtgtgaattacgaggctggtcatggtgagtgtcggggcctccatggatgctcggggtgatttctcatggatcctgcaaccacgtctccccttcacaagcctcttgccaagccctgctggccctggtcctctgtgttcttgctccttaggtcagtctcagacattcctgacacttgtgcttcgtggccctttcccagccctggctggcatctcgcgatgtagaagggagagaggccagaaggagagcagctcagcccacgaggaggtgcccatggaggctggcaggggcccaggggcccccctgcactctccccagttttgagaccttagggcagtctctcaccctccagtcttggtttctccacctctgaaagaatcacttttccttcctgccaggaactgaagtcaaaggcacggcattattgagacacattggggagcagtgggcccagcactgggacccatgctgggtgtcccaagagcacagaatgttggcagggaggggcgggggccaggcagggagctccctgctgctctacggctgccccacctgcagcccttcccttcaccccacgccccagtttcctctgctcttgggtggccagtcacccaggggtggtatccagggaggttcttgcaggcccagcttcactggcctggaagggctaagctacctggcccaggggtgtgtccactttgtcctgggcaggctatgggcatcccacaggtggagtcccatggcagggctggagccagggggtaactcggcaggacagaggcccagccaccaggaagctcgcctgctgatggccaagctcaggacaccttgcaccactgtacctgaggacaggctgtgactgatgacagtggcttcatcctcagaggggaagtgtcctggagggatgtggctggaggcacccagccctgcgggagcccctttgaatgagcagatacctcgggaagcagggtgaagggggcagaaactgggaactctggatttcaagacttgaaagaaaagtgctgcattgtgcggtggcatctgcttgtggggacaagggctccctggtgagacctctccatcccctccctccctccccctctgtctcacactctttctctctctccctgtcctcctatctcggcctcgcactcgggtcgtgtttggtctgtgatgtcaccactcccctccctgtggctgccattcagagctggcagtaatgaaaagcacaggattcccactcactgggccccagcagcactacagagacatggagccctttgttgcaaataattaacttggtcccatgttgcataacatcctaaaaagctttcctgagcgagcacccgccagacactgtgatctcatcaatactgcatcgcatcggacactactgctgtgtgatttcattaaaaatttaatttgtgttttaaatctgcagtgttccctttaaaaggatggcgagggcgggggatgaagagagtgacaggcttgggtctgggggtgggcattccaaagcagaggaaaccccacgccccacaggaggtgggggcggggcttcccactggagcagcggcccctctccgattggctgggcttggtctgtggcctctcctggtgctggagggagagtgatggaccattgatggaaaatgcttttctgaagcttaatggttttccctttctctcggccacctcaggcagagggctgctcctgggaacccagacacaggaggatggccaggtggtggtgcaggtggtggtgcaggtggcggtgcaggtggcagggcaggtggcggtgcaggtggcggggcaggtggtggtgcaggtggcggtgcaggtggtggggcagggcaggagtgccaggtggcagggcaggtggcggtgcaggtggcggtgcatgtggtggggcaggtggtggggcagggcaggagtgccaggtggcagggcaggtggcggtgcaggtggcgggggcaggtggcggtgcaggtggcagggcaggtggtgcaggtggtggtgcaggtggcagggcaggtggcggtgcaggtggcggggcaggtggcggtgcaggtggcggtgcaggtggtggggcaggtggtggtgcaggtggcggtgcaggtggtggggcagggcaggagggccaggtggtgggcaggcggtgatgcaggtggtggtgcaggtggtggtgcaggtggcagtgcaggtggtggggcagggcaggagggccaggtggtggtgcaggtggcagtgcaggacgtgttttccggagaccccgtcctctgtgcccctccagacccagtgcctacagtggtcaagaccagagctgcagcctcactcctgccctcctggctgtgtgacctcaggcaagctgcttgtcctctctgagtacagatcactgcccggagtgtgagtgggggccttgcctgtccccagctccaggttgctgacaggagagtgtgagtgaagggccttgcctgtccccagctccaggtcagcacccgcagtgtcactctcacccccgtgtggctatggagcaggcagccattggtgactgggtagcagaccctccggaaaggctgcggttctgttttctttctttgtctagacttcactctcttccagagaggatttaagctggccttcatcatcggtgctgcctgcagacccgtccctgggatttcgctgcgaatgggatcctgttgtttctagacagggacctccattgtgttggggggggattggtttcactcctgtttccagtgagcggggagggaaagagagctcaggttctggttgggggaggagagagaggaaggtgaggggagcacggagaaggagactctggggcaacttcgtgatgctgcctgcctggctctgcctggggactctttggtcccgcccgccctggccaggccaattgtttcctgcggaaggcagggatttgtgcatctccaactatctcctgacagtatgccagagtgattaagctaagcctcccggggccagcagaagagaggggacaaattgctttgtgaaattgatttgctgctgttagcatttacagcttgccctgggtacgcccacagtgtgaggcggctgcgtgggcgtcctgctcccccttccctctcccgcagcacacgggctctcacttggcacctgcgcacacatcacctgtcgtgtgtcacatagccaggcctcaggacctggacttcagtaccactcacctcagggcacaggtccaaagtgtcccaaatgcccatggaggcagacggccacccacagctgcagcctgcagagagaattgccccagagactcttggataggtgggtttccccaggccagcgtgagagctggggccacgagatctgagaggacacctggaggcccagagaggaggcgtgagctagccctgggccagggtctccccatctcttttttttaaatttgttttgttttagactgagtcccaatctgtggcccaggctggagttcagtggcgtgatctcggctcactgcaacctcctgcctcagcctcccgagtagctcggattacaggcgcatgccaccatgcccggctaatttttgcatttttagtaaacactaaaaatgatttcatcatgttggccaggctggtctcgaactcctgacctcaagtgatccgcccgtctcagcctcccaaagtgctgggattacaggcgtgagccactgtgtccggcctctccccacctcttggggggccccttctgccacaccggctgccctcctccattccaggggaaggaagacaaggagaatattgccctggtcagcaacagttctcatagaagctgtatgaactcaggtgagcgtcatgaacccacacgcctgggtgctggggccattcagagaagaggcggtgctgggactggtggatccttccagacagagaaatgtggctgagcatcaccacccaggaaatagaaagcactgacaattcgcccaggtgggtcccactatgcatttcaagaaatgcgtgcttggtaacggaggcagcatggcctcggtgcaccccaggagatgggagactcaggctacgggcgctgctgggtatagtagcctgctttcaggctctccttgggcaccagctctgagcaggctctaggcatgactagatggtgggaagggggtccagggagccatgagaggagcagcctcagcgtctctcctgggctggagccaggtccatcgctcagctgctgtgtaacctcagacaggtgacttcacctctctgggctgtggtaagggttacattagacaaaccccacaaggctcttagaacagtgccggttggtaggcggggcacggtgactcacacctgaaatcccagcactctgggaggccaaggtaggcggatcacctgaggtcaggagttcaagaccagcctggccaacatggtgaaaccccttctctacaaaaatcagccgggagtggtggcacacacctgtaatctcagctactcaggaggctgaggcaggagaatcacttgaacctgggaggtggaggttgcagtgagctgagatcacgccattgcactccagcctgggcaacagagcacggactccgtctcaaaaaaaaaaagaacagtgctggtcagtggaagcatttggcaaatcctagttgtgactgttgctgttttcccctcccttgagatgctcagatgtttgtcatcatacaaggacgtgagggtggggcacaccagcagtgcttctgaggttagggggctcttcagtcccaggccagggggaaggaaggaaagtgggtctctcagcagcaccacagactggaccctagcacagcaggcacgtccctttaaaaatttaaattaaaaatatttaaatgggggtaaaatatacataacataaaatgtaccatgttaactgtttttgagtggagcgttcagtggcattaagcacattcacgtgattgtgggaccatcaccatgagtccccagaactcttttcatcctcccaaactgaactccgtctccattaaataccaactccccattcgccctcccccaggcctgggcacccccccattctacctctgttccagttaaaccagtgcccagcgagactcatgtaagtggaatgatacagtgtttggcccaggaagccttgtgtaagtggaatgatacagttttgacccaaggaggctggtgtagcttctacctttcctctataatgaataagactgctgtgaacacgggtgtagaaatagctcttcaagaccatgcttttacttcttgtagatgtgtacccaaaagtggaattgctggatcatatacctcccttttaaaacaaatgcagaaactgaggctatacagaagggctcagaggtttgccgagggtcccagccacctcagtggcggagcaggcagcatttccccaccccaactctgtgggtcgctggcactatgctctccctccccagcgtctgtgtggcctgttttattcccaggctttatagaaggctctctggaagacatgagctgtgatggatgcaccaaaggagggtcatcaccattccttctttttttttttttttttttttctggagacaaagtctcactctgtcacccaggctggagtgcagtggcgtgatctcagctcactgcaacctccgcctcctgggttcaagtgattctcctgccttggcctcctgagtagctgggattacaggcacccaccaccacgctcagctaattttttgtatttttagtagagatggggtttcaccatgttggtcaggctggtctcgaactcctgacctcaaatgatccacccatcttgtctttccaaagtgctaggactacaggcatgagccaccatgcccagctgagtgtcatcaccattctgaactagttttactcacactctgacaccaaatgtgtgagggttttttttttttttcctacatcgaccagttcttcaactttccagacagctgggtggcctacaactcacttcaattcttacactgactacctgtagttagcacagacctcacatttaagggtcagtcccacaagattgccccctccttcagacaccaatgacaagtcccaggttgtcaccagttcttctggttgactggctataaatcagggttcccataacccccatctcaggttcaacagtttactagaatgactcacagagctcaagaaagtgctttacttactattgctggtttattataagggctacaactcagaaacagccacaaagaagagatgcataggacaagatacgggggaagaggcaccaagcttccatgccctccccagcaccttgacctgttccccaacccagaagctctttgaaccccatgtttagggctttttacggaggctgcatcacacagtcgtgcttgattaaatcatccgcagttggtgatcaactcaatctccagcccctcgcccctgtccagagctcattgaatcgggagccttaagaaccccccacccccagttgctctttctcttccctctggcatggtggctagatccctaggtgatgaagtggaaggaggcctcctgctgatccacgatgaacctactgtgggaaagaaccagaaagaacagctgccgcttagagcaggtggtatctcaagcctgtgtgttactgcagcaaaacctatggccgcctgggtcctgaccacctgaggggtacagtgttctcaggggcgcatttctgccttcacgtccctgagcctggggaagtcctgcccaaactcggttctcctggagtctctttcatctttgaggcaaccactacctttccgtcaactccctcttctgcttcagttaaccacaggtaggttttgctccttgcaactgacaacctgggctgatggaggaagctgtttcagctgttatcaagcaacacctcgagcaggtgagtctgtagctggaggcctccaaggtgctggtgtctgaagcaaagataggtcactggaaaaagaggtggcgtgtgtgtgtgtgtgtttagaaacagagtgtagttgtgtgtctgtgcatgtagaaagaggacatggttgtgtgtgtgtgtttgtgtgtgcgtgtatagaaagaggatgtggggccaggcacagtggctcatgcctgtaatcctagtgtataattgggaggctgaggtggacagactgcttgagcccaggagttcaagaccagcctaggcaacatatcgagagtctgtctctacaacaaaaaataaaaaattagctgggcatggtgatgcatgcctatagtcccagttactcaggagactgaggcaggaggatcacttgagacaggaaggttgaagctgcagtgagctatgatcacgacactgcactgggtaacagtaaaactccgtctcaaaaaaaaaaagtgtttttttgtgtttgtgagcatgtgtgtgagtgtataggaagaggatgtggtcatgtgagtgtgcctgtgagtaatgtatatgtgagtatacctgtgtgtgtgtgttgtgtgtatatgtgagtgtgcctgtgtgtgtgtgttgtgtgtatatgtatgtgttgtatgtatatgtgagtgtgcctctgtgtgtgtgttgtgtatatgtgagtgtgtgtgttgtgtgtatatgtgtgtgttgtgtgtatatgtgagtgtgtgctggggcagcatcacaggaattcgcctgccataaggccgggctgcgtcacggctaaggccgcagttcccccaccgtgcctgggtttggatcctggctgctccggtcgcctgctgtgggtccttgcacacattaacctctgaacaccagtggccgtatctgaaatagcgcgagaacaaaactcaggattgctggggagctgtaggagtggaattatgcaaagcatggcatgtcgcccgtaacagacttccgggccaccgtggtggtgccgacacaggccggccggggcgtgcgtggggtctggctttgtcttcttgtctccctctgctcctccctcctcccctggccgagggagcccggcctgtcttcctggccacagttcgggaggccgccgtcctcaaagctgggcaccagctatggctcagtgtctccagcctccaggattcctgtggtcgggatccagcgtctctttatcgtttttaaagtgttttgctgctgggaagcctcaagcctctccgcagagggacataaataaaggcaggaacttggccattagtaggcttcatgtggcgtttccacctgggagcgccctggcgtgctgcaagctgccctcactggccaagagcagggcgggaggggagcctctggagttctccggttctgggttaggtgcctcttactctctgggctgcaaacagacgggggtgcctggcaatgtgccccgggcggagcacccctaacagttgcagttcaaatttggagccaggctgaccctggttcaagtcctgttgctgtgtgctggccgtgtccctggacgggtggcacaaggtcttggtctccagtgtgcagatgagagatggtgattatctactcctgggtgctgggctcagagccgctggcaccagccctgggggctgccagacatatagccctcggctctgtcacgcccggaactcaaacctcgcaggcagtcaggggagaggtctgtgtgtggagctcagaactcagtgagcaccccatgtgcctgtaaggcctcgccatctcctacccaacccagatgaggctcctgcttcccacccctggcagggagtctgatctcatcctagctcaaaggtggaaactgaacgtgggccaggtggcaaagttccccagtgggttcagcttccgccgggtggaggaggtgggaggcatggctggaggcctggcatcaggctggatgaggtggacccctcaggcttgaatccaagagggctcagagggtgagtggggccccaggccacgtctccaacagctgcccacctagccttgcgcctccgccttccttccttcctttaaaaatggctacaggcacattttctttgattacttttatactgaataacactatcctttttaaagcaaaaaatacatgctcatgataaacaaatggaaccggacagatctttatcaaggcccccgcaatgtgaccttgtgactccaagacagaataactttccatgtgtgttttcaagaggttgtggggagccgctgaacctgggagcagtgagggcacaggcgagagctgtggccaggagagtcacaggagcggcaaagacgaaagggagtgggagatgggaggccaatcagaaagcagtgcccgaagctgggtgaggagcagcaaaggcgggggtttccttgaggatacctgagagccatgctagggtggggaggtctggggggagttgtgggctggccttgagtttgagattgaggcccaggctgagagcgtggtgacccctgcactgtgggtctgctcgagctgtgtgcttcccaggagcaagagcaaagaggccagagggaggggggcagaacaggccagcaagggagcccccagaacaggacacgcgttccttggccctccccaggcagccctaagagggaagagaagctctgccccctcctgccccctcctgccctctcctgttccctcctgccccctcctgctctcctccatggagtcagggggccccaggtggccatggccagcccattcagggatctgagccccagagcctgcatgccagggtgagcagagccagcttgactgcagccatgctgaccccgcaaccttccccgaggtctgaggacaccacgctcccttcctgccggcaggttgtaattgggtttcacacggggccttctggcgctgacctacatgttccggtccgtgcctccttggtttctgagtgtgtgcccctgatggttctggaacctctgggcgtgggcctccttccctccccgcctcatcagctgctctgattccaccgggcaaggtcaggctggcaaggaaggaattggagctgcagtctgggcgccaggcccagagtgtgcttcccaggggctgcctgtggggaggctcccgatctgcccactcccgaaataagaaggggcgcccagagaggaggagactctggatgcgtggtcagcaggcaccggctgccatccccaggagagtcattgcctgtgaggacgttgaccctggtaggacccgcctctctgaagctgtctcgggtgtgagtgaggaggaacggggtctctggggactgagccctcatctccagtgcaaaatgcagaggcatgggagggaatcaaatgaaacagtgtgtgtggaacagaaggcgccaaatgggaatgtccccctgcctgtccatctccctccctcccccgcctccttatttgcagacggagggactggatatcctggcagagcgtcttccgtgatgcgtaacctcccaggagatgcatgttctggggttccccacttacagttgagaatacagaggctaagaagggtgaagggactgcctccgggtcccaaggctgttccaagtgatctaggactcagctttggtcctcctgccctcagcacccttggtcatcacctccactcggtgtgcaggaggctcctgctgtaggtgcccagatgttcggcagctttgtacttagaaatttcgagggggcggtcgggcgctgtgtctcacgcctgtaatcccagcactttgggaggccgaggcaggtggatcacaaggtcaggagatcgagaccatcctggttaacacagtgaaaccccgtctctactaaagatacaaaaaaatagccgggtgtggtggtgggcgcctgtagtcccagctactcgggaggctgaggcaggagaatggtgtgaacccgggaggcggagcttgcagctagccgagatcacgcactgcactccagcctgggtgacagagcaagactccctctcaaaaaaaaaacaaacacacagaaatttcgagggggcagagggtgtcctaaccttgtccctcagcaggtcttcaccctggcaccttcaccagacacccgccatggctctcggctcagcgggtagctgagtgtgttctctttgggttctgacaggttccagcttgttttttgagaccttgtcagcgtggggcctgccgggaagcaggtgcttgtctttaatgggatgccttatcctgggctccacaggctgcacggggcgttgttcaggtgactcctacacgccgaggcgtctctagaggaggagcctcaaaaggactagcagggggtgcagataactttgtttttaaaatgaagccaaagctttcaccacatctcagagacagagtgacccgaatgtggaggtttggctggaaccaggcaggtaccatccactacggctcccacctctcctgctcggaatcccccgctgccctcccccaggccctggtctctgatttcagactcgcctctgctctgtttcacgtctcctgcaagcagacaagcatgaagcctgccctccgaggctgcatgaataatagaactgaaatcatccctagttaaaaatagatactcttcttaataaatattttacatactgtctttaggatatacaggtcccctggctgaagacttaaagcaaaccctgttatcgaaaccaaaagatgtaggaaaggctctgcccgggctctgccagtgtgttcctgcaccacggctcttgcctcaaagccacccactctgcggtgacgtccgacgcagacagcgcacacacggattacgttggaactcatagccaggagcggcttgggaattcttgggtgtattagtcacttgtgaattttatggaggcaaatcaattataaagtgccccttggttagtgaggcttggagttcagaaaacccaaaagcaggttcttacgttactgctgcgaggcaaggccttcaccgtgaatggaagctggggtgtctgggggcagctgtgtggaggaagagaaaattctgggcagaagcagttggagtttaaagtgctggcccatttctgaaaactttgcaaactttgcaaaaactttggatcggacgtcactgcagagtgggtggctttgaggcaaacagagcaatcttgaaggtctccattaatgaaggcatggcgtggtctggatgcagcaaatgcatttgaatgatctgcaggaaggcctcgtagccttgctccccccacccatgtgcttccccaggaagacaggggcagctaggaaatgctggggcctgcccagtgtgcagaccgcttccaggtgaccccacgctgcatggcccaaggcaaaggctggagcgtccttatttaacaggagaggaaagtggatactggaagggcagagcgtgctggggctggaacagacaagccccaggctggagggcccatgtctcactccctctgccccacacctcagctggtctgcctatgtggtattcttgaactgagtgaagagacccttctctgtcagggccacctgccccacagaggggctcttgtcttccttgtgctcaacataccttgaggacattttgctttagcacccagcaccctggatggcatgtaggggtccaggtgtgtctctgctccagacagtgaatccttgagcacctggcttagagctgggcccctggtacatgttgttacatggatgggtgggtaggtggatgggtgggtgggtaggtggatgggtaggtgggtgatatgatttggctttgtgtccccacccaaatctcatcttgaattgtaatccccataatccccacgtgtgaagggagggacctggtaggaggtgattggattatggggggtggatgggtggatgtgtggatggagggatgggtggatagatggagggatggaggggtggatgaatagtgtgtatggataagtggatggagggatgggtggatgggtagatggagggatgggtggaggggtagaggggtggatggacggatggatgggagcatgtatggataagtggatggagggatgggtggaggggtagaggggtggatggacggatggatgggagcatgtatggataagtggatggagggatgggtagataggtggatggagggatgggtggatagggggatggagggatgggtggatgggtggatacatggatggagggatggtggataggtggatggatggatagagggaggggtgggtggatgatggagagagggatgagtggatggatggatgagtagatgaacagatgtgtggataaagggatgggtgaatgggtggatggagggatgggtagatgggtagatggaaggatggatggaggggtggaggggtgggtggatggatggatggattgttgtgtgtatagataagtggatggagggatgggtagatgggtggatgtgtggatggaggatggtggataggtagacggatggatagagggaggggtggagggatgatggagagaggaatgagtggatggatggatgagtggatgaatagatgggtggataaggggatgggtggatggagggatgggtggatgggtagatggaaggatggatggaggcatggaggtgtgggtgggtgggtggatgggtgtgtgtatggataagtggatggagggatgggtggataggtggatggagggatgagtggatgggtggatgtgtggatggagggatggtggataggtggatagagggaggagtggatggatgatggagagagggatgaatggatggatggatgaatggatgaatatatgggtggatgaagggatgggtgaatgggtggatgaatggagggatgggtggatggagggatgatggatggtaggggtagatgggtggatggagggatgggtgaatgtattgatggtagggtgaatgaagggatgggtggatagatggctgggtggaaggatgggtggattggtggatagataggtgaatggattgagggatgggcggatgatggatggtggatggatgggtgggtaggtggatccatggatggatgcacagagggaaaaaggcacattgtatcagactccaaagggagaattaattgcagcataaaatgggagtccaggacctctcttatttcagagttcatcgtgtagatgggaacagtgtttaacccttccctctcccactgccctctgtcagctgcttcccagttcctaaattattggctctgaaagtgggggctgggggagtggggaaaagagtggagatgctgagactttcccatgtgtccagcttccagaggcttccaggacagactgtggcaccatggttagtagccaggagcaggttagggcattatggtacctccccaaacaaagcagggtgctccagcttcaggcagtcaggaccccatctgctcagtgagtgtctggtcagcacccactcaggccaggctgtgtggcaaatacaaaagaagttaaaaaaaaataaagacattccattatttcaatagaaagaattttttaaaaatgtgtcactggaggtacacttgctttacattttttgctttggaagatgtagggaaaaaagtcatgaaatgttttcatttctctgtgattgagcagactcttaaaatattaaactattgcttaataattgattaaaactaatctctgtgggagccaaccacccatttggtaggatctctttaaacttttaggggcttttagctccccctggccgcctaacctttctcttgtctgattcattctgggctcagcagacgtttggtctcttgtggattgatgatgtcaggatgcttctgtcgggccgtgggatggctgatgaggctggattccgaacaaggaacatcctagggacacagtgtctggagaggcagtgagggaagaggaaagaaatgtctgtgaataattgtactgcagcttctaaaactcgggacgggagtcagagaaaacagccctgtggccttcagagccgcttaagttgtctgtgacttgagtttttccacacaatgacaatggtgcctgcctctccattttcccaggaacgctaagccatcgagcaaagtggtttagaatgtgggcgcaggcatccgagtgtctggcttcaaaacttccccagcaagttaccgaatgtgtaaccttggacgcgctttttattttctctatacctcagctccttatcaataaaatgaggatagtaatattaatagaaaccctcttctgtgcagatgaggtgaggcaatgcatgtaaagttcttagcactggccagggctgggcaaaggcagggctcactatgcatttaagagctcaaagcccgggtgagctggctcacgcctgtaatcccagcactttgggaggccgaggcgggcggatcacctgaggtcgggagttcaagaccagcctggccaacatgcagaagccctgtctctactaaaaatacaaaaaaattagccgggtggggtggcacacgcctgaaatcccagctactccggaggctgaggcaggagaatcgcttgaacccgggaagcagaggttgcggtgagcccagatcacgccattgcactccagcctgggcaacaagagtgaaactctgtctcaaaaaaagaaagaaagaaaaaagcccaaaggagactctgaattttaaaacaactactttgaggccagtcacggtggttcacgcctgtaatcccagcacttcgggaggccaaggcaggaggatcacttgggccccagggttcgagaccagcctagacaacatggtgagaccccacctctacaaaaaatgtagaaattaactgggtgtggtggaacatgcctgtagccccagctactcaggaggctgaggtgggaggattgcttgagccagggagttcgaagctgcaatgagcgatgatcatatcactgcactccagcctggtgacagagggagaccctgtcttgaaaaaataaataaaacaaaaacaactactttgaaaaagggatcattaggtgaacaactgaagcctctgaaactaaacagtctcagccaggtgcggtggctcacacctgtaatcccagcactttgggagtccgaggcgggtggatcacctgaggtcaggagtttgagactagcctggccaacatggtgaaaccccgtctctactaaaaatataaaaaattggccgggtgtggtagctcacgcctgtaatcccaccacttcgggtggatcacctgaagtcaggagtttgagaccagcctggccaacatggcaaaaccctatctctactaaaaatacaaaaattagccaggtgtggttgtgcatccctgtaatcccagctacttgagaggctgaggaaggagaatcgcttgaacctgggaggcagaggttacagtgagccaagatggcaccactgtactccagcctgggcgacaggagcaaaactccatctcaaaaaagaaaagaaaagaaacgaagcagtctcaaagaaatgtttgtacacttgtgtttatagcagcactattcacaacagccaaaatgtggaaacaacccagatgtccatgggcgcatgaatgggtaaagcaatgtggtatgtacgtacaacggggtattatttagccctgaaaaaggaagaaaattcagaggtcgggtgcagtggctcacaactgtacctataaccccagaactttgggaggccgaggcaggaggattgcttgagcccaggagttcaagaccagcctgggcaacatggtgagatcctgtctctatacaaaaaaacaaaaaaaatcagccagatgtggtggcacatgccagtggttccagctacttgagaggctgaggtgggaggattggttgagcccaggagttgaggctgcagtgagctgtgatcataccactgcactccagcctgggcaagagagcaggaaaacgcctcccccagcatacacaaaggaaggaaattctgactcgtgctacaacatggatgaatctcaagacatgctaagtgaaataagccagtcgctggccgggggtggtagctcatacctgtaattccaacactctgggaggctgaggcaggcagatcacttgaggtcaggatttcaagaccagcctgggcaacatggtgaaaccctgtctccaccaaaaaatacaaaaacaaacaaaacaaacaaaacaattagccagatttggtagcacatgcctgtagtcccagctactcaggaggctgatgcatgagaatcacttgaaccctggaggcggaggcaacagtgaaccgagattgtgccactgcactccagcctgggcaacacagaccccgtctgaaataaataaataaataataaggcagtcacaaaggggcaaatactgtataattccacgtctatgaggtatttattttattattgttattatttttgagatggagtctcgctctgttgcccaggctagagtgcagtggtgcaatcttggctgactgcaacctctgcctcctgggttcaagcgattctcctgcctcagcctcctgagtagctgggattacagtagcctgccaccacacccagctaatttttgtatttttagtaaagacagggtttcaccacattggccaggctggtcttgaactcttgatctcaggtgagccacccgccttggcgtcccaaagtgctgggattacaggcatgagccaccatgcctggccctatgatgtatttagagcagccagaaaaatagagatagaaagtggaatggaggttgccagggctggggaggggaatgtggagttgtcatttaatgggtgcagagtttcagttttgtaagatgaaaagagttctggaaatgaatggtggtgatggttgcataacaacgtaaattaacttaatgccactgaactgtgcactcaaaaatggtaatgatgataactttatgtgtagcttaccacaattcaaaataataaaaggatgggtgaggtagctcacgcctgtgatcccagcactttgggaggccaaggtgggtggatcacttgaggtcaggagtttgagaccagcctggccaacatggtgaaaccccgtctctactaaaaatacaaaaattagccaggcgtggtggcgggtgcctgaaatcccagctacttgagaggctgaggcaggagactcacttgaacctgagaggcagagattgcagtgagctgagatcgtgccactgcattccagcctcggcaacagagcgagactccatcatcctaggccttgcacagatgaggtggggcctttgattaagagctcagcggggaccaccatgccccctccccacctgccccgagacatcctcagaccagcctcaaaggcccacagctggattggccagcctcaactttgcatgctgtcggtgggcgtggaaatggatccagcctccttgaaggtgccactcaggaggatgtccaggaaatcttaaacgtgagtgaaggcaagagctcctgagtggtgggttgggatctgaacacagccccacctggttctagcacagccctggtcctcattcttcttggtccagccaggcaccgtgggctacatcatcctaagaaaggggaataaaaccagagagggtagagtcagggcctggatccaccctgattaatctcccatccagagaatacgaaaggcaatgccaggaagatgttctaaggtcaaatgaaccatctatgaactcacgcttccttctacagagcctgtggcttacaaagcactttggctgggcgtatctcttccatttccctggagctgccctgacctggggaacaccaacctcgtctccctctctacagacttctccacttaaaatggccaagacaggggctgccttttctgggggttctggggtattcctgggggagatcaaggctgggggcaggttgatggtggaggtgcagggtgccctgaactgggagtcacactgtaggctccgcagcagccggaagagggctcaaaatacaataaggataaataaaactcaggcttcctttctctctctgtctctttttttgagacggggtcttgctctgttgcccaggctggagtgcagtggcacaatcttggcttgctgcggccttgacctcccattctcaagcgatcctctcaccccagcctcccgagtagctggaaccacagcacatgccaccacaccttgctaatttttttctattttttgtagagatgggggtctcaccatgttgcccaggctggtcttgaactcctggcctcaagctatcgtcctgccctggcatcccaaagtgctgtggcgtgagccacactgcacttggcagccttcgtttttttctttcctctttttatcagaccaatacaggcaggtgatttttttaaaagtcagatttttaaaaaacctgacagtacaaagaggtttataaagaaaaggattccctcctgctccgcctttctcatccccggagataacctcttttgacggtttccgttttaaatcatgatggtggtcacctcctcaggtccaaataatatggctacagtgctgttgcttgatttatggaccttagaaatggcccaccgatttcccgctgcgatcgatgaggactcagctcgtcggcactgccactcccagccccagttcagtttccgagtctacctctagttcgtctgctgcttacttgctaacttggaattccatctgagacccagcctgaggccgtcacctgtgggcagcgtctgctctcctccttggggatggagggtaccacccttcctggaccctcccatggtttcctcagctcctgtctgcttttctctgccaaagttggaagttctctcatcctgctctgcagggcagctgcctccatgcctggtgggcagagcgggtctttcactccacagcgtgcgctgaagtgttcgcagcgggtcctgcacggccaggcatgtcctccccacgttcccagctgcgcactggacacacccaagtcacactggacccttcctgatgcgccaccgccacggagggtccaaaccacttccggctttagatggctttctgcttggcccacgccttcctcatgctcaccccactttgtggggagtagcagctgtggccctaatgtgccccgtgccaccctgactttaggtcgtggactctgtccaggcttctcctcaaagttcacatcagcatcttcatatctggaccaaaactttctggcgcagacttttgttgtttctgggtttctaatggccttttttttttttggcgctgcctcgttggttgtgccctggagtcctgtcgcctcgtgtacttcagccttcgggttgaggctgaggttcctgttggactgggggtgacttttgtctgcccacgtgggtggcaagtgaggagcagcatggggttggctctggccagagccgagatcttcagggcagtggccaagccctgggtgcaggggccgcccatgccaccaacctgacacctccacttccagaaggggaagctggtccgagttttatggccgttggctgtcgaaactggacccacagagccaagaccctgtgctgcgcccgctgcaccctgagctgtccagaggcccagcccctccctacactgtgtcctccatggcccagaaagcacttatgcacatgctcacacaacacacacaccacactcaatccacacacatcacacactacactcaatccatacacaccacacagcacacaccaatccacatacatacaccacgctcaatccacacacactatacagcacacgccacactcaaccacacctcccccacacacaccacacacaacactcatacctcacatcacacaacacgctcaatccacacaccacacacactcacaccatgctcaatccacacacgccacacacaacactcataccacacatcacacaccacactcaatccacacacaccacacatcacacactatactcaatccacacacactacacagtacacaccatgctcaatccacacaccatatgcacatcacactcaatccaccttcaatccacacacaccacataccacactcaaatccacatacttacaccacactcaatccacacacaccacacacactcataccaccctcagccacacacaccacactcaaatccacacacatcaaacacatacacacaacacacacacaacacacaacattcctaccacacaccacacatacataccacgcacacacacactcacaccaccctcaagccacacacacaccacacatcacacacacactacacacaacactcatgccacacacatcatacacaccactcaattcactcccacacattcacacaccacttacacacacaccccacactcaatccacacacaccacacacactgacacacatactacacacacaaacacacacacatacacggcatgtgcccctctccctgggctggtgggagcggaggcccctcgagaggaaggcaggccctgtgcccaggagcatcccgtctgcagaaggagtctgccctccagcgggaggagtgaggtaccgaagccagggccccgtgagaccccggcaggtgggcggtgagcgagttcgcaggtgaggagggcgtgggcactgcagggcagcggggacagcctgtggagccgccaggaaccaaggcagcaggcctggatgccgggtgcaggggcttgggcttcatggagaccaaaagggctctctggagggtcttgagaaggaaagggctgaggccagactccagccttcttagagctcgtcctggctctgggtggagaatgggcctggcaggtgagggagctgcctaaaggcagtgtgcgctgaggccgctggccagggacctggaccacctgccatggaacagtgcgtactgaggccgctggccagggacctggaccacccgccgtggacagttacactgcttccctcacccatcctctggtgacacatcctccggtgacacatcctctggctgctgttagagatggaatttcactcggtcaggcctggggcaaaccactcagaggacacagggggccaagggagcccaggcaacttcctcgattcgcacctctgtacgggggatccaggtcactctattttctcaccatttgaggggccgggtgcagccatgccgccgttgccctgcatagagacaggtggctgggctcagtggctcacgcctgtaatcccagcactctgggaggctgaggcaggtgtattgcctgaggtcaggagtttgagaccagcctggccaacatggtgaaaccctgtctctactaaaaatacacaaattagccgggcatggtggtgggtgcctgtaatcccaggtgctcaggaggctgaggcaggagaattgcttgaacctgggaggcagaggttgtagtgagccgagatcacaccactgcactccagcctgggcgacagagcgagactctgtctcaaaaaaaaaaatagagacagggtttcaccacgttggccagactggtcttgagctcaggtgatttgcccacctcagcctcccaaagtgctgagattacaggtgtgagccaccgcgcctgggccctttctagtcttcttaaaattcagttttctgtcaagagcagcaacccaactgtaaattactgtggtcagggactaagtcaccttggtgtcatcctggtgtcaccctgatgtcaccctcgtgccccagcacctagcatggcgccaaattggtttttgcagcaagaataagtgagtatggcacttacaatggaaaaaaacccaatagactttatttaattaaaaacattaactttctctggcagtcaaggttggagccacccgggagagccgggcgtggcaaacacacaggcccgtctggaaagctctgccagcggggctcctgacccaggtccagcaaaagcagctcaaggtcagcctcagggcctgacatctcccaggaagaatccaaaacacccccgctcctcagcagcactgtcctcacttgcacaccgtcctcgcctgcgcaccgtcctcgcctacgcaccgtcctcgcctgcgcactgtcctgcgccctcccaacctgcacttagcaaggtcatgccctgaggtttcagaacaaatccaactttcaggacaatttgactagaaaatacaggccaaaaatccaccctgggatctttgctgcagtatagattttcttgtttttgccctgaacgagtcagttaacgattcagattaacaagagatctgagcctgggagtatctgggagtcatagagagaacagctacgggccagggccattagccaaggggctgctgatgctgggaggcctggggcaagtggacgggctcacaggccagctttgagggggatggggtggatgactctgagcccagaccagacatctccccacctcaggcgctgtctcacgtgccgccttgtggggttaactttgaatgtcaaagcccagaattttcactagggtcgccttccatcctgtcccttcatttgagaagcggaaagcgaggcacctgtgtgggactggcccaggctgtgcagtggctccccaggtgtcctggtggcacgtggggcaggaaagtcgcatcagtcagggttcccagagaggccgaaccaccaggatgtaacacacacagggatggattgtcaggaatgggttcatgcacttgttggggctgtaaacccggagtctgcagggcaggctgcagcctggacacacccgcgggagttgatgttgctgttcctagactggaggcaggttccctcctctcccaggaaccgcagtctttcctcttgaaggcctttcttgttttgtttggctttttcacagtgttggaatgtacatttcctttttttctttctttcttttttttttttttttttgagacggagtctcactctgtcaccaggctggagtgcagtagcatgatctcggctcaccgcaacctctgcctcctgggttcaagcgattcttctgcctcagcctcccaagtagctgggactacaggtacaggccaccacacccagctaatttttgtatttttagtagacatggggtttcactatgttggccaggatggtctcaatctcttgacctcatgatccgcctgtctcggcctcccaaagtgctgggattacaggtgtgagccactatgcccggccctggaacgtacattttcttagcagaacttattaagaacataattacaaaagaatttcaacaagtcaatgatagcatacaaaagaaagaagggaaaaaatatatattttattgagacagagtctctgtcacctagacaggagtgcaatggcatgatcttggcccactgcaacctctacctcctgggttcaagggattctcccacctcagcctcccgagtagctgggattacaggcacccaccatcatgcccggctactttttgtgtttttgtagagactggatttcaccatgttggccaggccggtcttgaactcctgacctcaggtgatccgcccacctcggcctcccaaagtgctgggattacaggtgtgagccaccacgcccagccaaaaatatcttttaaagtactcattattttcactttgttgggaaggtaggtatttatatttaatagttgagggaatatcgaatgtttctttttaatagatgctaagcaggatagttagtaaccgacatgtttaatattcaaagttaaaatacttgagaacaagtattaggtatataggaaaatggaatggaagtttctccacgtttgtctttccatagccaaaagaggcagaaacttttcttctgagtctctcagaagaaattccaagaagactagaagccgctggcatgaagagtaaacgtctaactatcaaaaccatggcacgaaagccgggggcccctgtagaaactgcaaaatttggaggccgtggaatttgtgataatattgccaggtgagcacatctcaaaaatgatattggcaattatatttcagtataggttgttataactaacagaaatgaagaaaacccgcgagccgggaccgcgggggaaggtgtccccggcgtttgccgcctgccgagcggttcggttctcggctccctggcagccggccttcaggtcgggcgtcttcgttggtgacttctgctttggccctcccggtgtggccgctggttgggctgcactgctgtgacccatcatcatctcctgaagctgcatcctgtcctgacttgcctccacgcttgcacactgagaaatgcagcacgttgattcacttgcttaaggaatgtcacacaaatcacagcattctgaaatttcttggtcattgtaaccatcttgattgggagatgagaaaatgcctgaagaaggagtacatagaaaagagttctggccaggcacggcagctcacgcctgtaatcccagcactttgggaggccgaggcaggcagatcacgaggtcaggagttcaagaccagtctggccaagatggcaaaaccccatctctactaaaaatacaaaaaaattagccaggcatggtggcacacgcctgtaatcccagctactctggaggctgaggcagagaattgcttaaacctggaggggtgaaggttgcagtgagctgagatcatgccactgcactccagcctgggtgacagagcaagactccgtctcaaaaaaaaaaaaaaaaaaaaaaaagagttcaagaccagcctggccaacatggcgaaaccctgtctctactaaaaattagctgggcgtagtggtgcgcacctggagtcattccccagagctggaggtgggtcctgaatcaccacaggcctcatggatgtcccgctctcccctgtgtcctgagtctctgacggtcaggccccagcacccagccaggcctcctctgaggaatggccacaatggcaggtttggaaagcggcccagacatcacagatttctgtaataattcgagatcatttggggtccagctcccaggcactgtctcacttcattcccgaagtgtgaaactgtgatattaggaatttgaatacagccagtccctcctgactgctggcgcctgtcctttcaggagggtgacgcaggccactccgcatcagggtggataactctgggacctgttttttaacccttgatatttaccgactttggtcagttcaccaatccccagtctcaaatttgcgaaagtaaatgctatgcccttttcatagagctgtcatccataaaaactgccactgtgttccctcactctgtcccccaatgagccctgcagcaggtggcctgctgccacgctgggaggtgctctgaggacaagcccatgcgtgctggtgacagctgcagccccttccctctgtggtcctgcctggctgctggtccagagccccttccccagcccaggatggctctccatccctttgggtgcctgagagagcaaacacctggtctcatatcaccggcagttgtggactggctggacggtgctgagagcgggaaggaaagaggggcagagggcatctgagcctggattcctgctctttctgccagctctgacctggacccacacctcctcccagcccccatccaaagcagagaggaggcacaatcagaaagggaaaagtaaaagaggaaagaggggtgcaaggaccaaagaggcacgcttcaggtaccacaaagtgatgaggctgcaccccaaaccccatcaccataatcatctgctatggactgagcatgttcatctgtccaccactgcatctggctctctgtataaattatctcacatacagaagcaggtcacagcccaccttgtgcctcccctctcttctctgctgcccccttgcaatcatgcaaactcatcgtccatcttaaaaatacggctggaatggggagcataccccttcaaatatcagtctcttaattgaaagatgtgcaaagacacagttcgtactcaatgcttcattctgttaatttctgcattgttgtctatttgtaaagttctgtgttcataacaaactcttttttaatgttatgatttggttttttgtttgtttgttttgttttgagacagagtctcgctcggtcacccaggctgatgtgccgtggcacgatctcggctcactgcaatctttgcctcccaggttcaagccattctcctgcctcagcctcccaggtagccgagattacaggtgcctgccaccacgcctggctaatttttgtatttgtagtagagacggggtttcaccatgttatccaggctggtctcgaactcctgacctcaggtgatgtatctgccttgacctcccaaagtgctgggattataggcatgagccactgcacctggacttgttttactgaaatcactgcagcaggctttgagtgcctattagtgactcactttcactgagcaagaggtagattttaggtctgcaacacagcacatgcccttgacaagctcacaaacttgtaggagggataggcctagacctgtagaccatgtgtaggagggaccaggcatagctcccagggagggggctgcccataaggtggtcctcttgtccaaagtgaaatggctcatatgacgcagcctccactgttctgaattctgcctctaaagaacccagaaaatgctgtcccgcaagaggattccttaggtaatgacttgagtccatgagttctcctagaagcatttctcaagttagactgaagaaaacattttcttttgagccaaacttcctttcattggtataatcctatataggtagccaaagcccttttacttgtatcatctacttttattcttacaacaaccttagggagtgggtaggaaaaaaacctactctcaccccatctcacaaataagggaaattacaagggtattgagtggtgaattttgggaaagaaaatctgttccttgtccagaaattcatttattcatttatctttgcatccatccatgcatccatccatctacccacccacccatccacccatccatccacccatccacccttccacacgttcacccatccatccatccatccacccatacatccatctacccacccattcatccattcaaccattcatctatccacccatccacccacccatccatccactcatctatccatccatccatccatccatccatccatccatccatccatccatccacctacccacccatccatccacccacccattcaaccatttatccacccattaaaccatccatctactcatccatccatccacccatccatctatccattcacccactcatccaccatccacattcatccaaccatccatcctccatatatgtgttgggtgggtccctattaaccagtcccagggctatatgctggaggacgaaggaggccctagctttcagataactcccagtctggaatgtttggatcctggagattatggcagtggctcattttctccttaacaactcaatattattaccttacccaaatacagtctgaggacaggcaaagcaggaagcagattcctttcgttggatttggggtgtgggtgcagctgcaagcagtaaggcacagagaagaatactggtgtcccataagcccctgagggtcaccacactaagtgctgggtcgtaagttgtatcaaatgtactgcctgagcctttagtcaatcctgtgagaggatttctggtctctccctcaacactaagaggtagcaaatcttctcttgatggattaatggatctaagagtcacgagggctcctgatttatagcctgcattcacgtctgccctctgcatagcctggcagaatcttagaggaaagttcttgggcagcagggtcaagtaaaggttgttattttaaagagaggggagaacattgtgtcaacacaggaaggatgtcatgaagaatgggacttggcagttccctgcggctgggaggagggtccacatagtacgacagctctctgccttcccaatccagtcactcatcccttttagagctcagactctggcaaacagactcataataacccaactcacaagagactgaatgatggcaatgtgcttcttcctagtaggaggtaggttcccagatctgcagccagggcctctggcctgcagtaggtcatccccactggagccgagccaggaaagaagagcctttcatgtatgttaccacatgtaagcctcttacagccaactccttaaggagctatgactgaggttcactgaaggggcaggaagtatcccaacgtggcccagcttgccagagaagagctggactttaactcaggcccagggctatttcccggcctgccttccttcttctctacctggcccagtggcccaccatagcctagttgttagaccctagaggtcaataaacctagtctcttccctggagactgaactgtagtccagaattgagattgtgcgtatgtgacatgtgattcctggatacataagacaacacacagagcagagggattgatccttacattttcgcagtcagggagatgctgagctgtgtctctgacggtgaatatagaattgtaaccaagggagctgatgttctcaggagatgtttgcagccgggtggagaagctcagtgcatgcttttggggctacttctggttaaataatagagaataagtgagcccacaatgtagagataatgtgagcgagtgttttgttgcgtaaggatgtgagagtctgagggtgtgtggcgtggatgcagaatgtgagattattgcagagagtgaggctgaggaggctgcagcgcaggcttgggggataattggaggatgcagttcccagggagagaaagaaggagtccagtcatggttagaaacaccaaatgattgtactcattatttctggctcagtagcaaattactcccaaacttagtgacttgaaacaactttggttattatggcacagatttggcaggtcaggaatctggctgggagagctggtccctctgctccgtgtccccccaaggccgtggtcatctcaaggcccctctgggaaggaccctctttcaagctcattcacacggctgctggtgggtttcagttccttgcaggccgctggaccgaagcctccctgggttccttgccatggaggctgccccgtagagcatcacacaacacggcagcttgtgttgtcagagcacgcaatcaggagggccaaaagagaggggaccagtaaggcggagagtgacagcaggatggaagtcatagccatccgtaacttagccatggaaatggcatcccatcagctttgctgcagtctcttcctagaagcaagccactaggtccagcccacgctcaaggtatgagcagcaggaatgggaccactggggcctgtcagaagctgcctggcaaaacgactaaacaggaatcaagcatttgctgtgtggtggacaccagctaagccttttatgtgcactctgtgctatgacccttcacaaagccctaccaggaagaggtcctgttattattctcatttcatagatgaggacattgaggctcagagaggttgggtaacctgctcaaggtcacacagccagagaacagcagagctggaacatgaacccaggcctgctgactacaaagccaggacctctccaaagcagaggtctccctgtcctcccttgcgagcttggacaggaagtggggcgaggtggggccgggaaagccgccttcccagccagcctgcctgccctctggctccaccgtctctgatctttttccactgtctttgctcgtttgacttttcccctgttgttcctactttcttcatccaaacaaatcctgtctgctcacatttcaatcttccagctgggtgccagccagagtcctcccttcccttgaatatgcaagattggcatgccccatgcagatttgccacaagcagagtgggctgctgcctccgcatggagcagggggcaccaggggactctcttgctgtccccagtatctcccgaatggcctgcccccacgcctgggtggtcaccattagcaatcgcttcatttgggttatagcagcgaggatgctggcggttcctgctgaaaccaggggaggcagaagcagcaggcagggaggcctttccctacgcacacctgagactcccagattgctttggtagccaacagccagctgggagctgggcctcaaggagttgggatataggacaggtcactttaaaaaaaaaaaaaagtgtggtaagggccgggtgcggtggctcatgcctgtaatcccagcactttgggaggccaaggttggtggatcaagaggtcaggagttcgagaccagcctggccaacatggtgaaaccccgtctctactaaaaatacaaaaattagctgggtgtggtggcgggcgcctgtaatcccagctactcgggaggctgaggcaagagaattgcttgaaaccaaaaggcggaggttgtagtgagccaagatcgcaccactgcactccagcctgggcaaaaaagcgaaactccatctaaaaaaaaaaaaattgtagaaacatacaaataacataaaatgtacccttgtactcacttttgtgcacagttccggggcatttggctcattcacatgattgtgcagccttcaccgccatccttctccagagcattttcatcttctcaaacagaaactgtccccatgaaacataaactctccaccccacccaccgcccccaggccctggcagtttccattccactttctgtctctgcaagtctgactgtgttaggggcttcatgcgagtggaagttgacaggatttttttttctttgagacggagtcttgctctatcgtccaggcttagagtgtagtggcttgatctcggctcactgcaacctctgcctcccaggttcaagcgattctcctgcctcagccttcagagttgctaggattacaggcgcccgccaccacacccggctaatttttgggtgtttagtagagacagggtttcaccatattggccaggctggtctcaaactcctgatctcaggtgatccacctgccttgcctcccaaagtgctgggattacaggcgtgagccaccgcacccagctcagcatttgttcttttttatttggcttctttcgcttagcataatgtcctcaaggctcctctgtgttgtagcctgtgtcagtgtttcactgcttttcgaggctaaataaggttccattgtatggagacaccaagttttgcgtatccgttcacctagcaatgaacacttgggttgcttctgccttttggttgtgtataaagatgccaggaacatgggtgtgcaaatatttgttcaggacaagtcacttggtgatgaaccaagaaggggacaggtgtggagggtggggctgctggagctgccagccttggagggaaaagcagagtggggggtggtgggctggaggaggtccggagcctgggggaggtgcaggggagggagtagggagtggggatgaggtgggcagcagcagggatatctgtaggagacgctgccttcccatgataccacctgccttgggcagaactatgttttctccgtaactggggtctccccagcattccaaagaggtagggatatttggggaacctgagagctgtcaagaaacagctgtcaggcagccgaacctagacttgctggcccatattcaggattgcttccaaggtcgggatcagccaagcctggcgggaaagaggcaaatgctggtcactgtctggcaatgcatgatgtggcaaagggactgggctgctgtgatacagagcactgctcatatgcatgggtcagctaatgcctggtaacaaacaggacctcaggggctgcactagcactcagggcttagcaagtttctgtattggccagttattggcacaataatgatgaatgccaaaccagtcccaagctcgggggctagctcagcatcactgatttcctgggcctgtggctggcatggctctgcctcacaccacagattgggctgggtctcccaccctcctgggctcgctcggcttactgaggcagcttcttgtcctggtgacggcagaggcaacagaaggcaagcccacccacgcacgcacgtctgcaagcccctggctttgctctgcctgtcttgctggccaaagctagcctcaaggccacactggacgtccagggtcagggaagcagattctgcctatgtgggaggagctgcaagtcacatgacagagggcagggacacagggaggggtggtgagaattggggcaaagctgccacctttctggaatgttccaaaagaagatggacgactactgctcctcggccctggaagggagagttcttttttccccactataaagttttctgattccaattccaaaatgctatgactcttaatcaatgcctgatgaaccatacttgagcaaacataatttattctctgtcaagatcatcctgaggggatcgggtgtctttgtttccctcctaaatcccctgcgaattcatcttttttattccaggcttactaggaaataaaagattttgtctgagggctgatgggtattagcagagctatatggagcttgagttgaaacttggaatgtttgtggatcaaaaccgagctgtgctggcagcgtctgggaggagggtgcactcgctgaaactctgcccgagttgtggctgtcagctgcctcgactgccagaccagactcgctgttttggggccgggtgggggggacggcggggggagtgttgttacggattgtgctggaaggttttcttgctcttggcttttttggtgaagggcctggattactgcagaaaatccagcttatgtgtccaagggcaaagcaggcctgtttatctttaacttttacatgcttcacacatctcctgaggtttgactctaagcaggatttgtgtcttccctgatgcaagaaaacaggaggcaggcgctgagcttgcaggaggccacacagccagtgcacagcttgccatatgcttaacgtggctctgagaagagagggttgtttttttaatattaaaaatggctatgggaaaatctgccctaatgctattaagcagtgctgatatgagatgtgtgtggctgtaactttctgattggatttgggatctaggctgcagccagccagacgctggagacacattcctgagccacctcagcccttgcctctttgccgagctgcggctattctttggggcacgcaggtagatgcagagagactgaagtcttcagaggtgggtgtgcacagaagagtgattcccagatcagggaagactttggcccccagatgacatttggcaaagtctagaggccttttcaattgtcacaattgggaggagggaggtacagtagcatctggtagatagaggccagggacgctgctcgacgcctacagcagatggactcacagccaagaatcatctgcccctaacattattcagccttaacttacaaaggaaggaaagtctggtgcatgtgtgctgtggtttgagtgtgtcctctccaaaattctgtgttgaaacttcatgtccctgtgtcctaattgccttaagaggtgattaagtcaagagaacgcctccctccataaagggattagtgcccttataaaagggctttgaggctggatacagtggctcacgcctgcaatccagtactatgggaggccgaggtgagtggatcacttgagcccaagagttcaagaccagcctgggcaacatagtgagaccctgcctctaaaaaaaaaaaaactgggagtggtgtcacatgactttagtcccagctatttgggaggctgaggcgggaggatcacttgagtacaggaggtcaaggccatggtgagctgtgattgtaccactgcactccagcctgggaaacagaacgagaccctaccataaaaatactactactaataaaagagctttggtgaagggagtttgtccctcttgcctttctgccctccaccacgtgaggacacagcgtcccccccaccaggaggaggcagtgctccaagtgccatcttggaagccaggctggaccctctccagacagcgaacctgctgagccccggatttcggactcccagcccccctggcaaaggcccgtgttctcttccaacatggtctagtggctacatctttgggagggggcgaatgctgaggcctcacatggtggacccactccctctggccctttgatagggaccctaattccatccgtgaagtctccaccctcgtgacctcatcacctcttacggtgtcacctcttaatcccattacaatggtgagtaaatgtcaacatatgaatttttgaggggacaccatcatgcaaaccatggcagtggtgccggctatgtaagtagctatgactgtgcagaggtcaccatggccatctcacatgcatgtcactcaaccatcaaaactcacccaacagcagttgcccaaagccccccaccctgccccacttgtacccacaggcactccagtcccagctccaaattacatttgtgcagccttatttctccaagtggcttcccacaagcttgagatgcaggtggtcgtcagggaaggtcctcatctctccccattggccaacttggttttatatcacctgccctgaagtccctctgccagaggagagccagtgactgtgccaggtgcttccttggacacacccaagctgccgtcttaaagaatcaccccgtcaagctctgccacgttttgtcatccggccccacatttccttcagctgtatctcccaccgttcccaaatccaacaacggcgcctgtgcgtggccaggagcgcagagaggcaggggtgggagttcccccagagcctggctccagctcacagctcagacaccccgtggccctcctgccctgggcccggatgagtcgggaatacgggactgctctccaaggtccccccttccccgtctgcagccagtcagcctctgagtccttatcatctgtttcccaaatagttccagatccctccctctctgcccttcccccctcatgcccaggtttgggccactattacaatttacctggattacctctgcagattcccaggctgccgttggcaacagtggaaggtgcagatgggggcgaggaagatggtggcgcactgcctctgtccttctctgctctgagttggagccaaccccgaggtctccttgcccctggcacgcccaatctcattgtcatgcaccagagaagtggccgggaagctccccggggcctggtcactcggcttagtcggctctgtcacttccccccccgcacctgctcagcccattgactctctgactgcacctcagcccctgccccccgccaggcagtcacctgcacttctgcatcctccaggggcctctctttcccacctcagggctcagtgcaaacggtgccttctttctcgaatgtggataatggaggaaaaatgttgcttccccacgaagccttcccaaccgcctaatttggatgcagtgtcccatcctgggcccttagccctgttgcagtgcacggtggttgacggcccatcatccttctcccctcaggacagaggccatgtcttgcttgtggacccttgatcctgtgtgagggacacgtgcctcccaaatgcctgggctcagccttctctggaggcttcttcactttgtggggatcctctaggtgtgtcggccacatgattccccttcactgattcatccagcaaattcattcccctccactgattcatccctgagcattgactctgatgggcaccagggccgtagcaggcccaggcagacctcgctctcactggcctctcctgcggaggagaagcagacgataaacaatggctgggctatgatgggcggtggcggcgcagtggagagagatcagacagggggagggcacagagagaggctgagggggctcttttgggagcagccatagaaaacttctctgagtgacgacgttagagacctcaaggaagtgagggaacaagcaagtgttgctggcgttgggaacggcaagcgccgggcttggggtggcccagggagagcacgggtcagcacgcctggagttcagcagcgtcagggaggtaacagggtcggatcctgtagggcttaggggtgatgttaaacactctggaatcatcctgcatgagatggggtcattggacgttttcgaacccttggggttcctcctctgatttaagctttgagagacccactttgcaaagttcccgctatacactctatcattacatcctcacaaattgcctgggcacagtggctcatacctgtaatcccagcactttgggaggccgaggtggatggatcacttgaggtcaggagttcgagatcagcctgaccaacatggtaaaaccccgtctctactaaaaatacaaaaaaaaaaaaaaaataggtgtagtggcaggcacttgtaatcgcagctactcgggaggctgaggcaggagaatagcttgaacccaggaggcagaggttgtagtgagccaagatcatgccactgcgacagagtgagactccatctcaaaaaacaacaacaacaaaaataaatcaacatatgggtaatcttttccccattctacagttgagaaaactgaggctcagagagaaagggtagtgacttacctgagggtgcagagcttgagtgtgttgaactttgctggaatctggctcagattcattctaaaggccccactccagctgccctgcagtaggaatggcttgaccactctgctccacaggcccaaagacaggatggggtcagggccaaaatgagtggtggtaaggtccaactcggttcttcgagaagtaaatcagctcctgagacgtcgatcttccagctgcaccctgtcactattgagacctagccaagcacttgggggcaattatatgggtggctgtggctgtattggaaggcctgagagaggagggagtcacaggtgaccctcttgagcaggagactcgggcccaagattcagggactgccaccttggtgacagtgtcaatgttggatgattttaggtaaatgatgccttcacagaggcctttaacccagcggaaaccagcttggcaggtacatgcttttttccttccttttcggtttcattctaccaacctccctgattgggttataggtggggttctccgaagctccctggaaggcccctcaggcttactcgggagtgtggaggtggaggggattatttgctcactccccaggagcagaggagggagactgtcccttgattgggggatgctctgagagatgccgtctgctgtgaggcgggaagaggaggggctccccggtcctcccggctgctcttcccacctcttttgggagcatgggatggaagatgcataaaaattcaaaccatcctgaaaataaatgaaaggaaaatatatatatccaagaaggagataaccatagcaatcactttcactcaaaggtaataaaaataaggatcgtaaacataaactcagaaattgcaagctgcactccctgccgacgtttgctgccatgagagagcacattccgagggaaggcaaggactttccagactttccaggacactctggacatgtctctctgattgaaacctccagaaggaaaaatatgggaggaaaatagtgagttatgggggggaaataaggacccaaactataacaaaaatggagaacacaaattatgtttacaaacgtttccctggctgacagagactctgcctggaacagatcacatatcataaggtggccaccttcccaggggtgggggctcctgggtgagtacagagtgttctgtgagtgacggccccccctccctgcccgcccccctccgccagcctcatggagctgcactggagatggcttattctgagcgtcagctgccgccttcctcctctgcagccatcagaccgaagctgccgctgtgacaagcaaaccagacaagatggaccgcggcagctgggctgtctgcagagggccatccaggcctccttgctagaaacatgcattttagatggacaaacggaacattttgtcctctttgccttctgatatttgtcttctgccagaagagagctaggacccaggcatcaaactacagccagtgaaatgttcctaactccctgcttgggttgcatcctgcgacggctgctcattgcccgacaaacgcttcgtcctgcctgggcatcatccttcagctgtaaccggcgatgcgattcccaagcactgtttaaactttccagtcaaaaatgagacaccactgctcacttatcagatttgcaaaaatcaagataataaagctaaggaaggctgggtgtggtggttcaggcctggaatcccagcaccgtgggaggcagaggagggacgattgcttgagctcaggagttgaaagttgcagtgagccgcgatcatgccactgtcctgcagtgtgggttacagagtgagaccttgactcaataaaataaaatataaaataaaataaaaaataaataaagctaaggaggaaaaccaaaacatggctagtcagtttggggaaggtgggacgacacggtgtcctcatgccggttcgtttgcaaactggaatgatcttttcggaaggaatgtaggagtgtctcaggaatctgtaaaaagttcacagccaggcatggtggctcacgcctgtaatcccagcactttggaagtccacagtggcagtatcatttgagcccagcctgggcaacatggggaaaccctgtccctacaaaaaatacaaaaaatatttgctggatgtggtggtgcatgcctgtggtcccagatgctcaggaggctgaggtgggaggatcctttgagcctgggaggcagaggctgcagtgagccatgattgtgccactgcactccagcctggatgacagagtgagactctgtttcaaaaaagaataagttccccaccttgatttgctatgagctgaattgtgtcccccagaaatccagttccaagtcctaaccctggtgcctgtgaatttgactttatttggaaatagggtctttgcagatgtaattaaagttaagatggtatgtctgctgtctttattttatttatttattttttctgagacagagtctcgctctgttgcctaggttggagggcagtggggcgatctcagctcactgcaacctccatctcctgggttcaagtgattctcctgcctcagcctcccaagtagctgggattacaggtgcacatctggctaatttttgtatttttttttttccagtagagacagggtttcaccctgttggccaggttggtctcaaactcctgaactcgagtgatccgcctgcttcggcctcccaaagtgctgggattacaggtgtgagccactgcacccagccgtctgctgtctttatgagaggagagacacatagggagatggaaggccctgttaggatggtgccagaggtaggagggatgcagccgcaagctgaggcatgtaggaggttgctaaggacaccttgaagctgagagaggggcacgaacagattcttcctgggagcctggaggcagcagaaccatgctgacatcttgatgttggaattctggcctccagaaccgtggagcaatacacttgttgctttaagctacccagtttgtggtactttgttacagcagccctagcaaactaagacactctatttttatgttttttgagacggagtcttgctcttttgcccaggctggagtgcagtggcacgatctcagctcactgcaacctctgcctcccgggttcaagtgattcttctccctcagcctcccagtagctgggactacaggctcccaccactacgtacggctaatttttgtatttttagtagagacagggtttcaccatgttggccaggctggtcttgaactccttacctcaggcgatccactcgcctgggccttccaaagtgctaggattataggtgtgagccaccgtgccgggttacaaactaatacactctttttgggcttttactttcacttctaggaagaaatattgtagctcattattttccacatttatttttatttccacatagtcagactatatttcccagtgtcctctgcagttagctatggccatgtgatcgagttctggccaatagaatgtggccagaagtgacataaacgccagacccggccaatggaaaccttgtgctcccgttcgggggtctgtgcccccaaggttaccccctaacacctactgaactactgtatgtgtgaaaaatggccttctattgatgctggggagttactgttccagtacttagcacagcttggctaatacaaggaaaaatcagagataaagaaaagcaaagattcacaggccaggatgtttccatattccacatcatttactgggggcagcagccggggcacaagacaaactcacttttcttttttttttcctttttttttgagacagagttttgctctgttgcccaggccagagtgcaatggcgcgatctcggctcactgcaacctccgcctcccaggttcaaatgattctcctgcctcagcctccctagtagctgggattacaggcatgtgccaccatgactggctaattttgtatttttagtaaagacggggtttctccactccatgttggtctggctggtctcgaactactgacctcaggtgatctgcccacctcggcctcccaaagtgctgggattacaggcatgagccaccacccctggccactcacttttcttttaatattcagggcagcatgaccccaagtctttgtcctttatatttctgggcagccattccttttgggatgtcataggggtccctttaggccctccccagatcagcctcctgccccactgctccctccatctggggtttatcccattgctgtggacagagagagtcgtcagtatgccttggggccagtgttcactctgggctgtctgagctgttcaaactctccctgccaatgtgtgttccctgctcctgtttctgcttctagcagtagctccttggggtcctgctcattggagtcatttgacaatactgggccaggcatggtggctcaagcctgtaataccagccctttgggaggcagaggcaggcagatcgcttgaggtcaggagtttgagaccagcctggccaacatggggaaaacctatctctactaaaaatacaaaaattagccaaaaatcgcttgaacccaggaggcagaggctgccgtgagccaagatcgtgccactgcacttcagcctgggcaacagagtaaaactccgtctcaaacaaaacaatactatgtgcccacactgcataccaggcgctggctctctgcagggggtaaaagggagaatgagacagatatgatccctgtcttcgtggagcttctatctggcggggcaaagggacattaaaacaatgtttaattagaatagtgattagtgcaatgaatacaatgtatagggtcccatgggagtggatacaaggtagggtgactatgttttatcatccaaatcagaacacctttgagaatgtaagaggacactattaataattatgccagaggaatgagtgaaaaccagggctgcctcagggaaggcagaacctttggccacctaggaggagaccaacccagtccccgacaagctgtctctgagcagctccctcccagctttggacccagccctgaccaatagctcgggggagcccacacagcttggatgagttctcccaggcttgactgaacctcactcttcagaaaacaccttaccacctccttcagggcccaggtgggctggaaacaagttccctgtatgtgattaacacaatggttgagaatacaggacgaagctgtgggtctcacagtttgctacgcatggactcacctgggattccaggctgactctgggctgccatcccctaacattgtgatgaaatgggtgcaactggggcatctggaattttattgattgattgattgattgagacacagtctcactctgtcacccaggctggagtgcagtggcatgatctcggctcactgcaatctccgcctctggggttcaagcaattcccgtgtctcagtctctctagcagctgggattacaggcccacaccaccacacctggctaagttttgtatttttagtagagacggggtttcaccatgttggccaggctggtctcgaattcctgacctcaagtgatctgcccgcctctgcctcccaaagtgctgggattacaggcgtgagccaccgcacccggtcattatttatttatttatttatttatttatttttgagacagtctcactctgtcacccaggctggagtgcagtggcacgatctccactcactgcaacctctgcctcccaggttgaagcgcttctcctgcctctgcctcctgaatagctgggattacaggcatgcgccactacgcccagctgatttttatagtagtagagatggggtttcaccatcttggccaggctggtctcaaactcctgacctcaagagatccgcccgcctcggcctcccaaaatgctgggattacaggcatgagccactgcacccaaccgatgatcttttattttcaaaatgtttcagaataattttttttaaatgtcaaataatttttaaaaacgtggcaaaaagaaaaggaaaaaaggaaattcacaaaatcagaacactgattcctctgcttaacttttattttcttcatttttgggaacattttccaatttcctccaacaagcatctattactttttacttttaaaatttaaaataaaaatggtcaaagtatgacgtgatgctgtttaaaatgtcaaatggtatttctgggatcataataccagtgggtccctggcctccccatttctggtcctgtgacccttggtccacatgtctgggcagagtgagatcctgtctttaaaatacatctcagcatttctacacgtgtctacggtctttttctttgcgttttaaaaaccaggttacaggccgagcatggtggctcacgcctgtaatcccagcactttgggagtccgaggcaggtgtattgtttgagctcaggagttcgagaccagcctgggcaacatggtgaaaccctgtcactacaaaattagtcgggtgtgggctaggcgcggtggctcatgcctgtaagcccagcactttgggaggccgaggtgggcagatcacttgaggtcaggagtttgagaccagcctggccaacgtggagaaaccctgtctctactaaaaatacaaaaattagccgagtgtggtggcacacacctgtaatcctagctactcgggagggtgacacaggagaactgcatgaacctgggaggcggaggttgcagtaagctgagattgtgccactgcactccagcctgggcaacaagagcgaaattccatctcaaaacaaaaacaaaaacaaacaagcgaacaaaaatgtgattgtgctacagtattatgaccactacagcctcactaggtgataggaatttttcagctccattgtaatctgatgggaccaccgtgctatgtctagtccacctttgaccacaactgttctgccgctcatgagtgttacttacaacatccttatgaaatagacactgttagtttcccaatgttacagatgaaatggggctggggtaagtccagctcctctcccagagcctcagggcaaggaattgacagagtgaaaactggaactgaggcctgtgtgactcccagcacaagcaggcgctggagggcccccggcagccacttgcaggctaatgggtgctcttgccccatgctgggcactgtgccacacattgcgagggtctgcgcttagcatcaggcagctgtgcttggaatctttgcccagacttggtcagtggagagatcttcagaaagttatttcatccttgtgcgtctcaacttccttgctgatacaatggatctagaacacaagctcttcccaggggttattaggagggttacaagtgttaattctcaggaaaaaggcttggctccccatcaatactcactaagtgttaggattatcctattttacttacaggcatatttctctaatctcccctatgaaaagcagaagcaatggttggcctacctttgtcccctcaggatctactgttcagctgagagcttgagaatcactgatgttatgtaaatagtacataaaataacaagtggggagtttaaaaagagacagttggtcacattctttgtattttcatagattattaaaatgaagggttacaaaaattcattttgcatattattattattattgttattattattattattattgagacggagttttcgctcttgttgcccaggctggagtgcaatggcatgatctcagctcactgcaacctccgccacctgggttcaagcgattctcctgtctcagcctcccgagtagcggggattacaggcatatgccaccacgcctggctactttttgtatttttagtagagacggggtttcaacatattggtcaggctggtctggaactcctgacctcaggtgatctgctcaccttggcctcccaaagttctgggattacaggcgtgagccaccgtgcccatccagtttgcatattatatattggataataaattttctcaacatagtctcaatcatataaactttcctcccccaccccatttttcttttttttctttttttttttttgagacagagtcttactctttcgcccaggctggagtgcaagctccgcctcccaggttcacggcattctcctgcttcagcctcctgagtagctgggactacaggcgcccgccaccatgcccagctaattttttgtatttttagtagagacggggtttcaccgtgttagccaggatggtctcgatctcctgacctcgtgatccacccgccttggcctcccaaagtgctgggattacaggcgtgagccactgcgcccggccccatttttctttttcttttcttttttttttttttttggagatgcaagttcttttattaaattctcaaattacccaatttgtgtgggccatctgtttcctacctggaccttgacacattcagaagtcaacaggacactgtccgaatgggttttggttagtaacttccttatagcgtctctcactgtggctcacccatctgtgttgttctcctcatccattcaggaaatgagatttttttttttttttttttttttttttttgagacagagtcgcactccatcgcccaggctggagtgcagtggctcgatctcggctcactgcaagctccgcctccccggttcatgccatttccctgcctcagcctcccaagtagctgggactacaggcacccgccaccacgcccggctaatttttttttaattaattaatttatttttttattgatcattcttgggtgtttcttgcagagggggatttggcagggtcataggacaatagtggagggaaggtcagcagataaacaagtgaacaaaggtctctggttttcctaggcagaggaccctgcggccttccgcagtgtttgtgtccctgggtacttgagattagggagtggtgatgactcttaaggagcatgctgccttcaagcatctgtttaacaaagcacatcttgcaccgcccttaatccatttaaccctgagtggacacagcacatgtttcatagagcacagggttgggggtaaggtcacagatcaacaggatcccaaggcagaagaatttttcttagtacagaacaaaatgaaaagtctcccatgtctacttctttctacacagacacggcaaccatctgatttctcaatcttttccccacctttcccccttttctattccacaaagccgccattgtcatcatggcccgttctcaatgagctgttgggtacacctcccagacggggtggtggccgggcagaggggctcctcacttcccagtaggggcggccgggcagaggcgcccctctcctcccggacggggcggttggctgggcgggggctgaccccccacctccctcccggacggggtggctgccgggcagagacgctcctcacttcccagacggggtggctgcccgacggaggggctcctcacttctcagacggggtggctgcagggcggagggactcctcacctcccagacggggtcgcggccgggcagaggctgcagtctcggcactttggggggccaaggcaggcggctgggaggtggaggttgtagcgagccgagatcacgccactgcactgcagcctgggcaccattgagcactgagtgaacgagactccgtctgcaatcccggcacctcgggaggccgaggctggcagatcactcgcggttaggagctggagaccagcctggccaacacagcgaaaccccgtctccaccaaaaaaatacgaaaaccagtcaggcgtggcagcgcgcgcctgcaatcgcaggcactcggcaggctgaggcaggagaatcaggcagggaggttgcagtgagccgagatggcagcagtacagtccagcttcggctcggcatgagagggagaccgtggaaagagagggagagggagaccgtggggagagggagcgggagcgggggagggggagggggagggttctttttcttttttattattttttgagatagggtctctgttgcttaggctggagtgcagtagcgtaatctcagctcattgcagcctccacctcctgtatataagcaattctcatgccccagcctcccatgcagctgggattacaggcatgcaccaccacacccggctaatttttttgtgttttttacatagagacggggtttcgtcatgttggccaggctggtctcgaactccccacctcaggtgatccgcctgcctcggcctcacaaagtgctgggattacaggcatgagccactgcacccggccccttttttctttttaaatctgccatgggtacagaccacatctttgtgattctacctttaggatctgggggaggaaggaagggactcccaataatgggatgtttgacctccaacggacactgtaccttcatcccttctccacaaagaatccgtagggccgtagacagcagcgtctgatgccgtaaagccttgcagatggctccccaagtccatccggactcatcggtcagggcgcccaggctggaaggccacccagcggggactgggcctgggcacctgctctcccagctgctttgcccttgtcttgctccacatggcaggcgtctcagagaggctcttcactgcccttcgcaaaacagcccagggtgggaaggagaggctggggtgcaggtcccagctccgtgttgggctctcaggcagtcccctccctgatgcatctccttctcggctctgtctttgccgtgttttccttggctggctttttaaggctagggctatgcaaaaatcctcacttctgaaggaagaaatgtggacagtgggtgaagtttattcagtaagaggcacttttcaccacagtccctatgctacccagggacccttttaaaaatgggaataactttgtttctgctaattgatctacatgcttattatataaaaaaatgaataaaatagaaaggtgtgctgtagaaggtgaaaatcacatgcataaataccaccatatttttagacgggtggagagggggagacagccttgctgggctcctggcagcctcacattcccagctgaaggcaatgctgtggccgtgttacctccttttccttcctcttctcacttcactgtcaacaaagcatctgacctgcaggggggagtggctcgggttttactaaaaacggagtcatgatgctcagacaaaagcgacgttcttcatgtctattttggtttcctttaagttaagcatagatttttctggaaaggaccggagctggctgttctccctgcatggaaaacaacagctcagcgaagcacctggttttctcaagttccctgacctccagccttgctcctgattcttgatgacaaaacacattcagtgcccttgattgatttagcagagaagtggcaatgctgccgcatggaacgcagcccattctgcctgtgaatggaatgcctcggctgtgatggtcttctgttttgggaaaagattaggtcagttgcagtgggtcaatgctgagctcggagactgaatatccagccaccttagttcttcctggtaaaggctatttatctgagccatttatgcaacccccaccccctgcatttctccctgcattcatttctgccttctgtcatatttgccccccacactcaggtttttatatttgttctcttgctcactttgctgtatctttaattccatttgtcgaacagtctaagttttagggtaagaaggagtcacctggtctacctttacatggtaggacaaggtgccccactctgttcaagcaggttattctgcttttttttttttttttttttttttttgagacagagttttgctcgattgcccaggctggagtgcagtggtgcaatctcagctcactgcagcctcaaactcctgggctcaagccatcctcccacctcagcctccctagtggttggtactacagacgcatgtcaccatgactggctaatttaaacaattttttttgttgttgaggccaggtgtggtggctcatgactgtaatcccagcactttgggaggctgaggcaggtggatcacctgagatcaagagttcaagaccagcctggcaacatggtaaaactctgtctctactaaaaatacaaaaattagctaggcgtggtggtgggcgcctataatcccagctactctggaggctgaggctggagaatcacttgaacctgggaggcagagtttgcagtgagctgagatcacgccactgcactccagtctgggcaacagagcaagacaccatctcaaaaaaaaagaattattattattttttttttgtcgagacagggtttcccggtgttgcctaggctagtctcaaactcttgggctcaaacaaacctcccacctcagcttcccaaagtgtgggattacaggtgtgagctactgcgcatggtctgttccactctttttggatcctagctgggcctggaagccccttcagccccacatctgcaggctgacgttcaccaccagcaggaggctttcgtggcatgtggtcttacaaacacctctgtgttcaagtcttgaataagtgactgtaagagactcatggagcaggttgttgccaacaccctcccccactttctttcttaatttctgcattttttaaaaattaagatgggatcttggtctactgactaggctggagtgccgtggtgcaatcatagctcactgaagcctcaaattcctgggctcaaattcctgcttcaacctcacaagtagctgggaccacaggtataaatattaaatttttttttttggtagagacagggtctcactattttgcccaggctggtcatgaccgttttcatagcttgaatcaaaccaggtttgtgtgttttctgagattcctaacattttgtttttaagattaaagtattttagctggacacggtggctcatgcctgtaatcccagcactttgggaggccaaggcgggtggatcgcctgaggtcaggagttcaagaccagcctggccaacatggtgaaaccccgtctatactaaaattacaaaaattagccaggcgtggtggcgggcacctgtaatcccagctactcgggaggctgaggcaggaaaatcgcctgaacccgggaggcggaggttgcagcgagccaagattgcgccactgcactccagcctgggcgacaagagcaagactctgtctcaaaaaaaaaaaaaaaaaaaaaggatcttatttaaagtctctgtggacaatagatgtccttgcttgtgaagaactggagacattggaaattggaactgcagccccgagtggccagcccaccacatgccacagtcatggaatcacccaggtgagacaagtcagcccttgaatttccaggctgccattactcacagatgctcactgcctttcaaaaacctagagccacttccaaatgcttggctgggacttgaagagaatcatccgtgacatactagaacgaggtttcttttaaatgtcaagatgccataaaatgattcaggcccatccttgaaccttcagggtgagagctgagcagtcacaagcccctttctggtctttacatgaatcacagaatttcaaactggaaggatccttagaaattcgccttctccaagttcctgatgtcacagacgtggagaccaagggtggaggagggcagaggctttgctgaaatctgcaggaattggtggcaggttggggaccatagaatgtgtgtgtgtcttcatcctcagtccaggacccgagtggacccctggctcggggtcacatgtgttaaacagtagagggtgtgttttgttctgctgttttgaggagaaggtgagtctctttctgctttgtcagatggaagtctggacaattacttcatagcattcattcatttgccacacatattgattaagggcccaatatgggacccgaactgaatcactgcaggagactttagagcgaatattgtctaagacctccaagtctgcctggctgtgaactatcctcagagcgacctgatttaagaattcagattctggctctcttccttggcgctgcctatggagggggcagccatctcctccttggcatcatggccgccctcagaccccctgtgaagcccaagatcatcaaaaagagaaccaagaagttcatccggcaccagtcagaccgatgtgtcacgattaagcgtaactggcagaaacccagaggtattgacaacagggttggtagaaggttcaagggccagatcttgatgcccaacattggttatgggagcaacaaaaaaacaaagcacacgctgcccactggcttctggaagttcagtctacaacgtcaaggagctggaagtgctgctgatgtacaacacttcttactgcgctgagatcgctcacagtgtttcctccaggaaccgcgaagccaccacagaaagagccgcccagctggccatcagagtcactgacccccatgccagtctgcgcagtgaagaaaacgagcagacagctcatgtgcatgttttgtgtttaaataaaactgtaaaaactgcaaaaaaaaaaaaatgcagattctgaatcccggtctccctgctccccgatctggggctctgggttggaagctgggcatcctgaattttagtttcctgggcgattctgaccacctggtgggtttggacttcaacgtgctcactgacaccttcgtttagaatttcagatacgaaaaatggatttcccaaggtcacacacgttataggtgaggaaactgagtctcacacagattcagtgggctttcccaggtcacagagctagttagggatgaatgggtttagcgttgctgcttttctgtaactgtgacttcctgcaagagctgctggaatgcagctgtctacagccaccggaggtggggagcaaggtgacaaggcagaggacaggagtgattttgttgccttcagatgagaacggggtcttcctaagaccctgcatccctgaagcctctgctggtaactgtgaggatagtctctgccaacagagagggtgccctgagtttcaataggagaattggctccatggggtgtaataaccaaacgaatgtgcggaatgacaatgatttaatcctgtagcctttattaaaggcttgctttgtgctgggtgagaaaggtctgggattgtattcttcattctcattttgaaaggaacacaaatgccatcaagattttgatatggatggccacatgtgtctaagccccggaaaaccatcctgagagatcaagaccatcttggccaggatggtcttgaactcctgacctcatgatccacccacctcagcctcccaaagtgctgggattacaggcgtgcaccaccacgcctggcctcgttttattcttatttatttatttatttatttatttatttttgagatggaatctcactctgtcacccaggctggaatgcagtggtgtaatctcggctcactgcaacctctgcctcccaggttccagctcttctcctgcctcagcctcccgagcagctgagactacagacgcacgccaccacgcccagctaatttttgtatttttattagagacggcgtttcaccatgttggccaggctggtctcgaactcctgaactcgtgatccaccctcctcggcttcccaaagggctaggattataggcgtgagccacggtgccctgcctacatttggttttatagtccaccttacacagttctctatacattgtaaatgagccaaatttcctgaattgaaaaagagagtcacacaagaggcttgcctccacgcacagacatgtagttttagatgtctgcacgtgaagctatatcaaaataagaataaactactgctaccaagaagtgggaaaaaaatttaaaaaggataaactgctcagaaaacgaaacagattaaacaaaaaattgtattagatgaaattttttttcatcgaatcttgctccagactcttcttctgttgcttcagacccttcttcatctgaagagtcttgctctgtctcccaggctggagtgcagtggcacgatcttggcccactgcaacctccgcctcccgggttcaagcaattctcctgcctcagcctcctgagtagctgggattacaggcgcgcaccaccacgcccagctaatttgtgtatttttagtagggacggggtttcaccatgttggccaggctggtctcgatctcttgacctcgtgatctgcccgcttcggcctcccaaagtgctgggattacaggcgtgagccacggcgcccggcctttcacttggttctctatgaaaaaattaaagagaaaatctgattgacactgtggaggacactacactccaaaaaaaaaagtactatattttctaatattatcagtgctttttaatattttctaatattatcagtgaagcttttgccgctttttcaaaatctggaagaaacaaggcggttgattcctttaatttcaggagcatgtaacttcatttataatgacaatgtttttgaaaaaataaattaaaccgacagtttcatttgtaggattgactttaataacacgcctctactgaacaaatggcgattaactggggaaaacggaattatggtaaccgaggtaacggggtcggggactctttctccttcgctgcatgctgggtggcggggagagaccgctctgaggaggtttggtctgtcggccacgccgtaggccgcggtgcattctgggtcctggcaatatggcgtcctccttgatgggctgatgagatgagtttcactgtagctccaaaccagagggcaaagctcccatgacccaataagcccacattgtccctttcctccgtggttccgtgtcgcccgtttctcaggactcgttctcaggcaggagagagcctcggggctgaaggccaggaccagccaggccgcgcggacctgaggttgaggaaccgggtgcaggcgagcacgatgggccggtcgtggctctggttgcagcagctcagacgagtgcgggacccgcagggctgagagtggctggaggagacccagggccctttgaacccgatcccttggccggagacctcagcccagtcggcccagtgggcgaaccggcaccaagagcggcctgcctgtcttcggaactgctgaggcggtggaggccgagagcagggtcatcgtgaggcctgaagtctcttacgcttttggcagctcccctcgcagcccctctggaaacgtacagcctcaggagcagccagtggcttgggacctggggtggtgtgtgtctgcggagcttcttgggctgccccatttcctagcggcccccacctccccacttcccgctcagagttagagataaggatctcagacttttgcctgagtaagggtctccgcactctttatccatttggttttcgatttcccgtttttgtttcttatttcaccaattctggtacacgctagtttttaaggctggaggttctcgagcgcttgctgccaaggactcccccaccccctcccccactgatggagtccgaaatgctgcaatcgcctcttctgggcctgggggaggaagatgaggctgatcttacagactggaacctacctttggcttttatgaaaaagaggcactgtgagaaaattgaaggctccaaatccttagctcagagctggaggatgaaggatcgggtaagtggattctgaaggcaccccttgaacttggtagtttccccaacaaagaaagtttacagcccgaaaagtgtccttgggaaagcgccgacatttccccctagccacacgttgtaagtcaactagaaagcaaaagccatttcagactgcagtttttggttgaaaatggaaaatgctgttttggttagtcattattcactgggtagtgttaattcaattccaactaagttctaattcagataataaaagttaagcaaatttgaaaatagagcattgcgagtatttacatgctctttggcatactacttagttctgtaaacacttagaggaaggacaacgtgcgatataatctttatacccacatgattagtctactttttaaaatatccaagctgggtgaagtgcagaagtctgatatactatgctaggaaatgagattactggaaaatgttcaactagtaacaaattagtgcaaagttattataaagttacactgaacttcattctagtcttctaaacaatttctcttgaagctagattttcctccttttatgtagtgtcctgttgctgtaacttggaaacaggatttctttaatcgtgagttagggtatgaggcgtcgagacttgggtgcaggttttagggtgtccgcatggtgtttggagtgtggagagtgactcacaagcagctggtaggaaagaaaacagccgaattttgttggatttgtccttcataaaacacccatctatttcctggcctcaaaagcaaaagggtagtactgcttctcctctatgcacacttataatttgtctttttgtaagttattttctccctccaggctgcttttatttgcacatttcagtggtataaaagaggaagttggtgttacaatgtttgattttctctaggcttatgtatatgtttatggaatattattgttttttagtatatgatgttgaacatatataagattacacttctgggctgggcgcggtggctcacgcctgtaatctcagcactttgggaggccaaggcaggcctcccaaaggcaggcggatcacctgaggtcaggagtttgagaccagcccggccaacatggtgaaaccctgtctgtactaaaaatacaaaaattagctgggcttggtggcaggtgcccgtaatcccagctactcgagaagctgaggctggagaatcgcttgaacctgggaggcagaggttgcagtgagccgaaatcgcaccattgcactccagcctaggggacagagtgagactgtgtctcaaaaataaataaataaataaaacttctggtaactctagtcagtcagtcagtagtaaccagttagctactgacttggcttacttctaaaaggttaggaaaatttgtttcatccaaaagcattttaaggagttaaataagttagtcattgggggaggttgtataaattctatcttatggacatctttagtagtaactatatagttaaaagcttttgtggttgctatacatatatgaaaagactttttaaaaaattctttgtggagggcagtttttttgttgttgttattttgaaatgtggttctctctgctgtcctaaacctatgttccaacagtttgaaactgattaatgggtatacgtttgaccttttaattaaaacattaatttgtgaatgatcaacattccctaataagcttttcacaggttgttaagagaaacaaaagttctgtgactcttagtgactactgagattgctgcttagaaaggagctggggagaaagtttgctgtatctgtttttcggtggagaaaatcagcagctaacatcttcagttgagtgtgtgggagtttggaatcttgtcatctcttccctcttccaaaggtcaggtcctttggaatcttgtcatctcttccctcaaggaccgtatcacacatgctataggacagaagttgcaaactcaaatgatattgagtggggatggtagcataagagaatgaaacaggccacatttaagaagaataatggcataggttcaaagataaagacaaatggcagctgacatttggcacagtgtgtgtgacagtttctggagggtgggaacaggggctccctgatgccataactgaaggggcaactgggctatggccaggcctctctctttgtctttgagaagtcagcaaactttttttttcttttattgtaaatattcatactaattcagatttattaccaaacacactgtagtccaacactgcaggctgaacaaccccatttgtggagtgtttttctgtttctttttttttttttttttttttgagacagggtcttgctctgtcatccaggctggagtacagtggtgagatcacacggctcactgcagcctcgacctcctgggcctgagtgatcctctcacctcagcctccccagtagctgagactataagtgtgcgccagtgtgtctggggttggggagtctcactgtgttgcccaggctggtcttgaactcctgggatcaagcaatcctcctgccttgtcctccaaaaatgctaggattacaggcatcagccaacacgctcagcctggggtggtttttttttttttttttttttttttttgagatggagtttcattcttgttgcccaggctggagtgcagtggtgtggtcttgactcactgcaacctccgcctcccaggatcaagctattctcctgcctcagcctcccaagtagctgggattacaggcgcctggctagttttttttgtatttttagtggagatggggtttcaccatgttggccaggctggtcctgaactcctgacctcgggtcgttcacctgcctcagcctcccaaagtgctgggattacaggtgtgagccacagcacctggccctggggtgttttttgaccagtgggttacctacgtaagaatctctgttacccaggcctccaggccacacagtcccactgtgctggacgtagcctccagtctggtggagcagcatgtttgtaaagtgaaatgtgtgggcgtggttgttctgtgctaggagctacatcaactacttcctggtggccactgactgtcctaaatgcaagctgagattttgcttcttcttgtggttaatgtgcaattccatacgcttttattttgtacatatattcattagttcttactggctcctatttagtagccttgctacagattcctcaaattgacatctttaccaaagttgactgactgatgactcccaagaagttttttttgccacccaacacttggcatccttccagagctacagcccttgcccgctctcagttgggattcctgccatctttgttttgaatcagtcttggttttcaaatgccacttttaccacattttaatttctaagttactgttactttaaaattattatcaagttagtttgttgtttggttaattctactatgtatagtgaatgaggcatatatgtatccatagtgtttttagcttgcaattttcaaataactagacatatatgaattgtagttcaaaatgaatcattcacagacctttggctaaaacagatacgtatatatctcccctatttgtgtttttggctcactgcaacctccgcctcttgggttcaagcgattctcctgccgcagcctcccgagtagctgggattacaggtgcccaccaccatgcctggccaatttttttcatatttttattagagacggggtttcactatgttggccaggctggtctcaaactcctgacctcaggtgatccacctgcctcggcctcccaaagtgctgggattacaggtgtgagccaccgtgcctggtctaactgtgatactttatagttatcacagagttcattttcctactggaaagtggacagtggggataactggtctcagatgactcttttgcctggaatatgtgggatggaatgacgggtgcttgagagctattgctctgaaagtgttgacagacatgctatgtctacacacatgtagactgacagacactctgtctacatgcatgtagcacccctggcagacacattctgtgtacacatgtgtggtgtcattgtcagacactatttccatgcatgtgtaggaccactgacaggcatcctatgtctacatgtgtaggggatgaaacggttagatgaagaaggctattttgtaaaccattctctagactcagttgcattgctctgtagccatactttgcccaggtcatggaggaagcagagtagatctgttcaactaatacatggactgccaaaggtttatgcggtcttttcagcaagggtaatagcaatccttcataatctacactaccccctctgctttcctcaccttgcgtcctctccacattccaactgtgccctgttccactcccctgagactggtctccatatggccccagtttgttgctaaatctaaagttctcttctctgtccttctctgttcttatttcacctctcagcagcattccacaatgtggaccatggcctcttcataaagctctttcctcacttgcttctgtgtctccacgaaactcggattttcctcttaggtcactagttgttccttctcagactcctttgctacctgacacctaaatgcaggggcaccccaggaattgatcttggaccccattctctgttctgggtgtgcccctccctagcagatctcatcggggcccatgattttaaatagtgtctacatgccagtgatgcttaaacccccaatctttagttctgatctggcctgaaatttctgtctcagatgcctactgcctgctttttcttagttttctccatcaccgcttgccacaaccaccatccactcagttgttcaagctgtaagtttagagtttatccttaattctttcctctccctctctttatcgccccatccaattcattagaacccatcagcgttacttccaaagcatgtcttacattggcctgcttcattttgtctccactgatgcagccccagtccaggcagccaccgtctcttgtctggacactgcatttgtgtcctgactggtctccctatgtccattcttgccctacaaccagtttttcacatagcagtcagagggatcttttatttattttgaaatggagtctctccttgtttctcaggctggagtgcaatggcgtgatctcggctcactgcaacctccacctcccgagttcaagagattctcgtgcctcagtctcccgagtagctgggactaccagtgcatgacaccatgcccggctgattttttgtatttttagtagagatgcggtttcaccatgttggccaggctggtcttgaactcctgagctcaagtgatcctcccacctcagcctcccagagtgctggattacaggcgtgagccatcacacctggccagagggattttttgaaagtgtgaaggggtgggttgcccctccacacctgtgggtgtttcttgttaggtgggacgagagacttggaaaagaaaaagaaacagagacaaagtatagagagagaaataaggggacccagggaaccagcgttcagcatatggaggatcccgccagcctcagagttcccttagtatttattgatcattcgtgggtgtttctccgagagggggatgtgtcagggtcacaagacaatagtggggagagggtcagcagacaaacacgtgaacaagggtctttgcatcatagacaaggtaaaggattaagtgctgtgcttttagatatgcatacacataaatatctcaatgctttacaaagcagtattgctgcccgcatgtcccacctccagccctaaggcagtttttccctatctcagtagatggaacgtacaatcgggttttataccgagacattccattgcccagggacgggcaggagacagatgccttcctcttgtctcaactgcaagaggcatgccttcctcttctactaatcctcctcagcacagaccctttacgggtgtcgggctgggggacggtcaggtctttcccttcccacgaggccatatttcagactatcacatggggagaaaccttggacaatacctggctttcctaggcagaggtccctgtggccttccgcagtgtttgtgtccctgggtacttgagattagggagtgatgatgactcttaaggagcatgctgccttcaagcatctgtttaacaaagcacatcttgcaccgcccttaatccatttaaccctgagtttgacacagcacatgtttcagagagcacggggttgggggtaaggtcatagattaacagaatctcaaggcagaagaatttgtcttagtacagaataaaatggagtctcctatgtctacttctttctatacagacacagtaacaatctgatctctcttgcttttccccacaaaagtgtgaatcagattctgttacttccttactggtggtctccattggcttcctctgtgcttaaagtagaactcagactcctcttgctggttcacaaagccttcatgatttggcctctgcctgccttttctgcttcttggatagaaactcctggaatgcttttctctctgatctttgcacacctggccccttctcgtcgttcatacttagcatctaggtcccttcctcagagaggcccaccatcaccccatctgaagcagccaccctgtcactcataaaccctcctgatggctatttatttctctgatatttttctccctacttcctcctggagatgtgagcttttcatcataaagcaaggacctagtctagtctatgctagtccatagggcagtgcttggcacatagtagggattcaacaaaactatactgatacaaaatggatagtttacaaaaggcttccacatacattatctttaaggctcaacagcaccataaattacctagggatcattctctccgtgttactgatgaggtaactgacgttttagttgaatggcttacctaaagttacataagtaacatggctagcagtgagaggaagtggaacctgtgcagagggagaaacaaagtttagttcaaaacaaaacaaaacaaaactgtatcataatgtctccactgaaacatttatgttaagaggtcagggggttgaaaatagcagaccagcagaccaacattcagcagacagagaaggatgctcagtctgctcacagcatgtgccctgtgcactggggcttctcctagacccttgcagggatccacaaggtcaaaactgttttcataataatggaacaccattggccttttccactctgttgatacctgcactgacagtgcaaaagtgatgaatcaagacagcggtgccaagctgtactactagttcctgatttctttgccatgcacatggagagaatgtccttgctaataaagcagtgaaaatgatgacttttactaaatcttgactgttaagcacacatctttttcagactgtgtgtgctgctccttctcctgcaggcaaagcccagtggctgcctggaggaggagcatctgctgccttcatggacgcagcacgtcccaaaggaatcaccgacaggccgcctctggatgttgaggcctgtgtccacggcagacgtgtttttgaaaatgaacttagtgagctgtcacttcaaggaatacagctgacagtatttgctgccagtcatgaaatttgaaccttcaagtgaaaattggttttggaaaacttgtatctgccgctgtgagcctggcagcttcccaagacttaaagatgtttctggtgagatccatagtgatattaatgaatggaattaatgttgtagaatgaaatgtgcccacatttggaacagctgcataattcagtgaacaaatatttccagatgaccaatccatgatattataaaatcatccataggtaaaagatccgttcaatgttagaccagtggattttaatgtaatagggtacaaaaagttcaccagaggataggtgtttttttttctttttttttaagacggaatcttgctctgttgcccaggttggagtgcagtggcgcgatctcggctcactgcaacctccgcctcccaggttcaagcaattctcctgcctcagcctcctgagtagttgggattacatgtgcctgctaccacgcctggctaattttcatatttttagtagagatggggttttgccatattggccaggctggtctcgaactcctgacttcaggtgatccacctgccttggcctcctaaagtgctgggattacaggggtcagccaccacaccccgcttgatgttctgttgtgtgcgtgtgtgtatattttttgttgttatttgtttgtttcacagttcactgcatccttgacctgggctcaagtgatcctcctgcctcagcctcctgagtcgctgggactacaggtgtgagtcaccatgcctagattttttttttggattttttgtagggatggggtctcactatgttgcctatagtgagagtttaaatattttattcaaatagattgcaacagatctttaagaaactaccacttactcaattttgttgtaatatcaaataataatattctcaattatttggatattctgatactcctgccattatgtatctttgtgaggccagatttttctcacatacttcaaccaaaacagtgtatttcaacccattgaatgtggcaccaaaaatgagaatccaaggtggggtgcggtggctcacacctgtaatcccagcactttgggagactgaggcgggcagatcatgaggtcaggagatcaagaccatcctggctaacacgatgaaaccccatctctactaaaaaataccaaaaattagccgggcgaggtgacgggcgcctgtagtcccagctacttgggaggctgaggcaggagaatggcgtgaacccgggaggcagagcttgcagtgagctgagattgcgccactgcactccagcctgggtgacagagtgagactctgtctcaaaacaaaacaaaacaaaacaaaacaaacaacaacaacaacaaaaaaaatgagaatccagttgtcttctatgaagctggatattaaagagatttgcaaaaatctaaaaaaagccacctgagacaagtgacaagataactgacaatttttgaaaatatagttatttgtagaaatgttatttatttgaatatataataagtttgatttttaagtgaattcataaatatatcaattatgtttttctgttttaaccttcaatacggaaaatgttgataaatgaaactcataaaaaagctctttgagggtcttcaggaacctttaagaccgtaaaggggccctgctgccagatgtttgagagttattagtgtagttagaagaaagtgggcctcatccttaggaagaagggcttgaggatatcaggtggctggtcagaaatgtcaggcagggccttgaagtgacattagataagaaacataaaggccctaatctgttgccctctttccattcgctctgcctaaagaactgttgaggtctctggacttggagctgggaggatgtttgtgaagagcctgtgtgattgtgagggcagtggccttacatgtggccacctagccctccatcaggtccttctattgctccagatttctagtgtgtgtccggagggagatgcaccaccgcccacccagtagctcttgtgctgggagtggaggaacacccagtctgtctggaggaatgtccactctgtctggcaaggaggaggtggccagaggttcagccaaggtggacagctcacgggaagtgtcctgtctctccagggcgctgctgcctagacagactgacagacacggtagcaccaaattacaatacgcaagtataggtatcaatcatagtaattacaggtgagaatgacattattacggggagcatcttgatttaatattaaataagtaaatcatttgcattgaactgcatttatgaaagaaatcatccacattgaccagcattaaactcccagcagccagtgacttcatgtagttggtgatggggagctgtcccaggattccagctggggagttgttgtgcataaatttgtgttttgaaataccttattggctatggatggagtggggtgattggagaggggcgagactggaggtgggggcaccaagtggagaggagttgtgctaatccaggtgagaagccctgggggctgggcgtggtggctcacatttgtaattccagcacttcgggaggctgagctgggaggatctaaaaagttttttgttttttttttcttaaatctaggtagatactttgtggttcccgagactcacatgagacactcacatcagcgcttgtgtgattgtaagggcagtggccttacatgtggccacacagccaccgtcagggcctcctatttctccagaattctgtctcacctctccaatccctctactccatccacagacaataagatctttctaaacacaaatttatacacaacaattccctagctgggctcctgggcagctccccatcaccaactacatgctgagcccaggaatttgagaccaacctaagcaacaaagtgaggccctgtctctacaaaaagtaaaaaataagccggacatggtggtgcgcacctgtggtcccagcaaattaggaggctgaggtgggaggatagcttgagcctgggaggttgaggctgcagtagtaagctatgattgtgctggtgcactccagcctgagtaatagagtgacaccctgcttcaataaaaacagcaagaaaagaaaccttgggagccacaaaagaggcggctgcagtaggaatggacgatagagcatggatcctactgatttgaagaaggtagaaatagaatgtgaagtggatgggttccagtgggtggagtttgtgggtgtagtgtggactggctggctggtacagttccgctctttttatttgctcttgaaatggatatacttttcattagtgagtctcatgtgagtttcaggagtcacaaagagaccatctacccagattaaaaaaaaaaaaaaacttaaaacatgctggccaggcacggtggctcacgcctgtaatcccagcactttgggaggtcgaggcgggtgggtcacctgaggtcaggagttcgagaccagcctgcccaacatggcgaaaccccgtctctactaaaaataacgaaaaatgagccgggcatggtggcgggtgcctgtaatctcagctacttgggaggctgaggcaggagaatcgcttgaactcaggaggtggaggttgcagtgagccaagatcttgccactgcacttcagcctgggtgacagagtgaaactctgtctcattgttccattctgaagagctgtggaagactcttgagatggataagaacatgtcctcattatcaccctgtggagttctagagctagagttttaacaagatagcatgtggattacacataggaggtgtcctccagtttctgactctatcctcctcttattcaaatgactttaaaaaggaattttgaaggctaaggtgggaggatcacttgaggaaaggagttcaagaccagcctggtcaacatggtgaaacacccatctctaccaaaaatttaaaaattaggcgtggtcgtggatgcctgttatcccagctacttgggaggctgaggtatgagaatcgcttgaacccgggaggtggaggtttcagtgagccaagatcatgccactgcattccagcctgggtgacagaacgagactttgtctcaaaataaatcaataactcaataaatcaataaatacaaaaataaggaggtattttggtcatctacaatacttgtttcaggagagctgaagtttgatacctttttctaagtctaaatatatggaaaatggccaggcacagtggctcacgcctgtaatcctagcactttgggaggctaaggagggcagatcacttgaggtcaggagtttgagaccagcctggccaacatggtgaaaccctgttttctactaaaaatccaaaaatcagccgggcatggtggcagatgcctgtaatcccagctactcgggaggctgaggcaggagaatcacttgaacccaggaggcagaggttgcagtgagccgagatcgtgccactgcactccagcctgggcgacagagcgagactccgtctcaaaaaataataataaataaatacataaatatatggaaaatgccattccagtaaatatttggcattgcaaatcaatgctttaactgtgttctaggctgggcacagtggctgatgcctgtcatcccagcactttgggaggctgaggcaggtggatcatttgagctcaggagtttgagaccagactgggcaatgtggtgaaactctgtctctacaaaaaatacaaaaaattagccgggcatggtggcatgtgcctgtggtcccagctactcggatggctgagtcaaggggatggtttgagtcagggaggtcaaggctgcagtgagctatgatggtgtcactgccctccagactgggtgacagagctagaccctgtctcaaaaaaacccctgaaacccttaaacttgtcacatattggtgggtgtgactgcagagaattgtcatgccttcagaggccgaacaggaaacagctgaagaggagacagtcgccgagaacaagtttgaattttacccagctgtcggtatatttttcaggtgcgtttattgttcttgactagtactttttgtattttaaaatgttgatgtaatttcaaactgacggaaaacctgtaagaatagtatcatgagcttccctatagcctttgcccaggtttgcagattgtttacatctcgccttgtttactgtcaccctccatttacatattcagactgagctggagatgctgtcccccttctactcctaaacaccgtgtctgtctccttagaggaggccattttcttacgtaagcacagtgcagttgtgagagtcaggacctgtatcatggatatgtgctcccggccctctgtagttcagaaggtcaggtgttgctgcctgcccagcaatgccctcattatgccccgcccgtcacccaggatcacacgttgcatttggtggtcgtgtctgtgtagcctaccttaatctaaagaagtctctcagtctgttttagactttcttgaccttgatttttttaactgtgaatttaccatctcaaccatctttcagcacacagtttagtggcagcaagcacacccacatgcttgtgcagccaccaccagcatccaccaccagcagccatctccagcagctttccatcttcccagactgaaactgtctccattaaacaccaactccccattccccttccccagcccttggtaaccgctcttctgctttctgtctctgaatgttttggccttgcatgtagtagaatgtcctgaatttgagctgcctagtctttcctcatattcacactgagatggggcattttgggtaatgatgcacctttgtcagtgaatcccatcaggagcacacgacggtgctttgtcccagtactgtcatgctcatttgatccattaccttcaagccgtttcttgctgagtggtcgcctcctgactgatgctgcccttttgccatacctgtttgggagcacgtcctgactttccagcacaaccagagggcccaagctcactctgtgccctccctgccccagtcctggaattagccttttctccaaggagcctggttcctgttagtggcgaatggcattgagaagccacgaacgtgtgcatttagagctgggctgtgtgctttgcccttggtgtggcatgcgtctcccgttggttggccctctgagcaggagagagaggatggcgctctgtcttgtttacctctgtttctctgtgtatgctggaaccatggatgtgtagagagagctccagtccagctcctcaccatgatatgttcagcccttcccactttgcctgctaccactccctacccagccatgggaaaccagctccattgtcctcatttaatcatgggctcaaagctggaatgcacagaagggagcctcggaatggctaacgctggccacttgggaaagcaaatgctgcaagaggttgacttccttgttttctgaggtaaacgttacatatggtgaaatgcacagaccccagctatctgaacaattggctcatgctgtctagaaatgtcagcattagtcagtgttttgtgggaaatcactgttgttttacatagatggcactgcacgtagggtgcatggggtgaaggggacggaagacgtggtcatggccctgtaggaatttacatcttataagagaaaaacaacatccttacccacagctgagtgaaaagcacagtgcagtcatgatctgcccttgagtaacaaggtagcgatttcaggaattctgcagctggacattgagatggtgtctgttctgcaccagagacttggctgagctcctagctggatgggctgtggagtccatggtggctggacgaagatctgtgtgctcaggtggagtggttgcgggagcagggcggaggatggacaatgaattcacaagtgactgatgtatagaatttagtcattcagctactatcatcgagccccttctctgtgctgggcactgggctaagtgctgcggataccatggggagtaattcctgcgttgaaggtgttttccagtctatcagggcagatggatgacagtgcaggaggcagggtgtgaggtggtggtggctggatgggccggacggagaaaggccttctggaggtgggagctctaagccagtagctgaaacagaatggaagggagtggggtggaaggttcagctggaggaacggggacgtgcaggagctgagaggtgagtgagcagggtcttcagggaaacgccactgggggcctcctgcaaggggccttcccttgtgctgtgggagccgcctcatgcccacccggtgctctgtgcctgccattcccttcccacactgccactccccagcacttggctacgtgttcgttttgtctccccactaggatgttgtatagagaacagggactctgtgttcactgctgagcccgaggctgttcccggggtgactggcggtcaataggtgatcaataactgtttgttgagtcaaggaagggagcagagaccctgagaagagaagaactgagagatctgtgagccggggggctggacaggacagatcctgaccggcttataaggccacaggaatttggattttatcttaagcacaagtaagaaagcttttaaagcagggtggtgacatgttcagaatggcattttattttattttatttttgaaatggagtctcactctgtcacccaggctggagtgcagtggtgtgatctcggctcactgcaatctccgcctcccgggttcaagcaattctcctgcctcagcctcctgagtagctatgattacaggcacctgccaccacacccggctaatttatatatatatgtatatatatatgtatatatatatatatatatatatatttagtagagatggggtttcaccatattggccaggctggtctcaaactcctgacctcgtgatccgtcagcctcggcctcccaaagtgctgggattataggcatgagccacgcacccagccctagaatggcattttattttatttttatttttagtttttttgaggcagggtctcactgtgtcactgaggctggagtgcagtggcacaatcaccgcttactgtagcctcgacctccctggtctcaggtgattctcctgcctcagccttctgagtagctgggactacaggcatgtgccaccatgcctggctgatttttgtatttttttgtagaaacagggttttaccatgttgcccaggctggtcttgaactcctgggctggagtgattcaccacctcagcctcccaaagtgctaggattacagacatgagccaccgcacccagcccaggatggcattttacaaagatccctgtggctgcagactggggtgtgtgagaatgtgtatatgtgtctgagtgtgtacgtgtgtttgtgtgtgactgtgtgaatatgtatgtgtgagagactgtatacatgtaagtatgtatgtgaatatgtgtgtgtgtgagtctgtgtgtatgtgtgattgtgtacatgtgcttatgtgtatgcatgtgtgtttatgtctgtatgtatgtgtgtacatgtttatacgtatgtatttatgtgtcagtgcatgtgtatttgtgagtatatgtgtgtgttagggaggagcatggtgtggggtggggagtctcttgagggtaggaggagatgagggtctggtggcggcttgggctggtagtgacaggcccggcagccccaagagcccctggaagcagaattgcgacccttggtgactgcttgggtgcaggaggatgcagggtgacacgcagcctcctaactggatgtaggagagaaaaacaagatacaccaggcatttggaaagccaaagaacacgtgtttgcttgtgaaaacttaaggaatgttttggtgggatatgttgaaattgttgcctaaaacgatcgctgatcttgtgcccctcagtgtgtggccttcgtttacccctgcttcccctcactcccctgcttgggggctgggtggtcatgacagcctccccagtacacagtgagcatcttttagtttgatgttttcttggagagctttttattttatccttaaaagtagatcagacaaggccgggagcagtggctcatgcgtgtaatcccagcactttgggaggctgaggcggacggatcacttgaagtcaggagttcgagaccagcctggccaacatggcgaaaccccgtctctactaaaaatacaggaattatctgggtgtggtgacgcacacctgtaatcccagctactaaggaggctgaggcaggagaatcgcttgaacctgggaggcagaggttgcagtgagctgagactgcgccactgcaccccatcctggcaacagagcaagactcttgtctcaaaacaaaaaacaaaaacaaagtagatcggacaagcagtttaaagatatatcaaaacaaaagtactgtgaaaaagttaaatcagatttttcctgcattttctgtaagtccttgctgaggtccagatttagttttcagctaggtgtgaccgtcgcctgccttgctgccgatgtcctgaagatgcttcatgttggcacatgtggcttcatcgggtgggctaccatcctgcatcaatagtgggccgtttccatggtttctggtctgttgctggtctggcttggcaggtggcagagcctgggtcagacccgcagtttggcctcagggctcaggctccagagaaccactgtgcagccttttacttcgtacacacagctcttttcaccaagatgtgtttttactgggtcagcaggcatgaatgttttccctgaagagtttttttttttaatttttatttttgagacagggccttgctctgcaacaggctggagtgcagaggtgtgatcatagctgaggaggctgaggcgggtggatcacgaggtcaggagttcgagaacagcctggccaacatagtgaaaccccgtctctactaaaaatacaaaaattagccaggtgtggtggcggccgcctgtagtcccagctacttgggaggctgaggctggagaatcacttgaacccgggaggcagaggttggagaattgcttgaatccaggaagcagaggttgtggtgagccgagactgcgccactgcatttcagcctggataacacagcgagactaagtctccaaaaaaaaaaaaaaaaagataataaataaaaaataagggagataaagttctgttttctttttttgttttgaaatcaagatatttgttttagtcaggttcttttggttgcaaagaagagtctcacttaaatgtccctaagcaactatgttgcctaaggatgcccagtgcatcttaattgctggatgagttgccacaaagtgaacactctcacaaccagatccagaaacagaacagccccgccttgaagatcctctgtgcccccagtcgtgcccacccctccccaggaagctgtgctcctgatgtccagggttgtgtgaccttacttttgcttttggtttctctcgctcagcattgtctgtgagattcatccatgctgctctagtagccatgctcattcacccccttggaccgcagttaactcacctgctgatggacatttgggtggtttccagcatttcggctactaaaattgtgctgcagggaacattcacatgtcttttctttttttttttttggagacggagtctcgctctgtcgcccaggctggagtgcagtggtgtgatctgggctcactacaagctctgcctcccgagttcacgtcattctcctgcctcagcctcccgagtagctggaactacaggcgcctgccaccacgcctggctaattttttgtatttttagtagagatggggttttaccgtgttagcaaggatggtctcaatctcctgaccttgtgatctgcccgcctcggcctcccaaagtgctgggaccacagctcgcatgtctttttgggaacatgtatctaatatgtctctggtgttgattcctaggggtggaattgctgggagatagagaatacaaatgttcagctctaggagataccgccacacccttcttattttattttattttttcatattaaaacaacatttattttaggtttagaggtacatgtgcaggtttgttatataggtgaactcacgtcacagtggtttgtgtacagattattttgtcagccaggtattaagcctagtacccaacagctttttttttttttccggatgtgcaggtttgttatataggtgaactcatgtcacagaggtttgtgtacagattgttttgtcagccaggtatcaagcctagtacccaatagctttttttttcagatcctctccctcctcccaccgtctaccctcaagtaggccccagtgtgtgttgttcccttctttgtgtttgcatgttctcttcatttagctcccacttataagtgagaacatgcggtgtttggttttctgttcccgtgttagtttgctaaggataatggcctccatgttcccacaaaggacatgatcttatttttttgtgtggctgcatagtattccatagcctatatgcaccaccttttcttttctatatgttgatctctggcatgtaccacattttcttatctgatctgtcattgatggacatttaggttgattccatgtctttgctattgtgagtagtgctgcagtgaacataagcatgcgtgtctttatggtagaaggatttctagctttgtgtgagagtcccagttcctccacatgcttgccaatacctggaacgcatgttatcttgaaagttttgtagaaaaacacctacagtccttacccttgagacttgtacagataatactaggaagtgtctcttacatgggagagtctttttgtaactgttggatgactgcgccaatgccatcaatgactttgtgaggtttggtggaataaggagcttggtagaagctggattgctgcggaataattgttaagaaggcaaagggaaggggaggtggtggtcacacaccatggggggtgtaggaggagcaaggtgggctggtgactgaaggaggccacagtaaaacaatgttttctttgagaaggagccagtgcaggggagagtcaaggcaggggagaatgtggtgaagcaagcggcactgctgaggaggggttagagccccagggctgggaggcggagggaggcgtgcactgctgtggaggggttagagccccagggctgggaggcggagggaggcgtgcactgctgtggaggggttagagccccagggctgggaggcggagggaggcatgggtgtgggagctgtctcgctctgtactttgtatctctttataatttgcaaacattttaaaaggtggattaatttccctaatcctgacaaaggccctagcaggcttattttgttacagttgagtaaactgaggctatttggagagcacagccaaccttaccaaattctttgggtgttaagcggcgagccaggagctgcatctagcgctgggacagctttggtgcccggtttctacactgctcttgcttagttttgagtgcagcctttctggcagtttctcattggtttaaagtccctccttatgtggagtcagacaactttgatggacttgaagaattgaagaggcaacatagtttttatctaagagaatgggatttggagtcccactgacctttctccaagctggttccacggctctctacctgtctgctcctggtctgagtctgagtgttttcatcaatcaagtgggtctaagactcctcctgcatagcgcagctgtagggattaagcaggataatattgagaaattccctgggactgcttgactgtagtttaagagcccaatgtttggtgcctgtctcatgccgtggtcagcttctgtgcagcaaatagagatagcgcggtaactctgtgtgtgctgttatggagaggtttcccagatgttactaagtaaaaacaatgcaaaacaaggcacagaacagattttatggtatgaacctatttgtgtttttaaaaaggtatatgtacacataaataaaataattatataaaaaatttatggaaggtatacacttatacacaggtatgggaggtaggggtaggtagaattataagaatgtatattttcctggctgggtgcggtggctcacgcctgtaatcccagctcttagggaggccgaggcaggcggatcatgaggtcaggagatcgagatcatcctggctaatacggtgaaacccctcctctactaaaaatacaaaaaaaaaattagcccagtgaggtggcaggcacctgtagtcccagctacttgggaggctgaggcaggagaatggcgtgaacccgggaggcggagcttgcagtgagccaagaccgcgccactgcactccagcgtgggcgacagagcgagactccgtctcaaaaaaaaaaaaaaaaaaaaaaaaaaaaagaatgtatattttcctgtacttaatttaaaaaacttctgcatgattattttagtgttagtttaaacagcaacaacaaaatattacccttatgatatgttctctattagcttattagctgtacctctttttttttttgagacagagtctcactccatcacccaggctggagtccaatggcatgatctcggctcactgcaacctctgtctcccaggctcaagcgattctcatgcctcagcctctcgagtagctgggattacagatgcatgccaccacatctggctaattttagtatttttagtacagacagggtttcatcacgttggccaggctggtcttgaactcctgacctcaagtgatccacctgcctcagcctctcaaagtactgggattacaggtgtgagccaccatgcccaacctatacctttttgttttattttatttttttttttggtggtggttctaagattttcaatattacatctttaagttatcacagtgtaccttcaaatgatattatgccacttcacatgtaatataagaaccttatagaagaagggtgtactgctctcccccgtccttttgctatcaatgtcatacattttatttccacacattttaaaccccacagtacattgttattacttaaaaaaggtctggccgggcgcggtggctcacgcctgtaatcccagcactttgggaggccgaggcaggcagatcacgaggtcaggagttcaagaccagcctggtcaacatggtgaaccctgtctctactaaaaatacaaaaaaaattagccgggcatggtggcgggcgcctataatcccagctacttggaaggccaaggcaggagaattgcttgaacccgggaggcggaggttgcagcgagccgagatcgcgccactgccctccagcctgggtgacagagtgagactctgtatcaaaaaataaataaaataaataaataaataaataaataaataaaagtccattatcttagaaataaattttaaaataagaatatctcttatattaacccacatatttctatttattttttctttttttttattctgagacagagtctcactctgttgcttcgtctggagtgcagtggtgtgatcttggctcactgcaacatctgcctcccgggttcaagcaattttcgtgcctcagcctcccaagaagatgggactacaggcatgcgctactatgcccagctaatttttttgtgtttttagtagagatgggatcttgccatgttgaccaggctggtctcgaactcctggcctcaagcagtctgcctgcctcagcctcccaaagtgttaggattacaggaatgagccactgcacccagcccacatatttctgtttctaggcttcattccttttatagctctgagcttgaatctggtatattttccttcagtctgaagaactttaactttgcttatagtactggtattttggtcacatgttttctcagcttttgtttgtctgaggttgtccttatttcacctttatgctcctagcactttaaggatgttctgttgtctcaggcttgtcttgttcctgaagtctgctgttggtcttacttttgttctctagtatgtaatattctttttctcctccagctactttaaagatgtttttgtcattggaatttagcagtttgattacaatgtaccttggtgtagttttctttgtgattagcctgcttatggtttgttgacattcttggatctgtaggattatacttttcaccaaaattttggaaaatgtactgccattatttttccagttttcctatctctccccttgttcctcctcaatcttccagagctctatttacatttattttagatgctagatattgtcccactgaggatccccattccctccatctttttttcctctgtgattcagttgaattgtttctgttgcaatgtcttcgcgttctctcatctattcttctatagtatctaacatgctctttattttattgttacagagacaggaggatctcactatgttgcccaggctggtcttgaactcctgggctgaagtgacctcccatggtgtcaggattacaggtgtgagctgcaatgcccagccctaccatgctcttaagccaactcatccgatgtatttcaaaatttcagatgctattttttttctttaaaagttccatttggatttctttcttcgtattcatgctctcttttaaatccttgaacaaatttgtaatattgttttaaaaatcttatctgttatttcctcgtcactctcatttttgggtctagatggactgactttcttgtggttgtggatcaggctttcctgctttttcttacctctagtaatttctgattggatgctggacatagggagtgttacgttgttgagcatctgcgttttgttttctgcatttaaacagtgttgagttttgttctggcaggaagttagtttacttgtagatcagctgccttcttatagggcttgtttgctgtcttttaaaaacaggtctaggccgggcgtggtggctcacgcttgtaatcccagcactttgggaggctgaggcaggagaatcgcttgaacccgggaggtggaggttgctgtgagccgaggttgtgccattgtactccagcctgggcaacagagcgagactctgtctcaaaaaaatgaatgaatgaatgaatgaataaataaataaaagcaggtctaggtcaggattggaaaactatggccccttgcttgtttttataaataaagtcttctggaacacagtcccattgtttgtggatggtctatgttgatttcatgtgacagtggtaaagttgagaagttgaggcaaaatctatatgtcccacaaagcctaaagtatttattatctgcccctttacagcaggaaatttggtgacccctagtctagagaagcctttacttttggtctagtttagccctgtgcctaacgttgtggcctttctgagtctccgtgagggtcgtgggtgcttcatgaggtcccttaattcttcctcgttggagcttgaatgtttctcaccctgctccgcttctcctgcccctgtggctgctctttgcctggcctcctggagtctcaccagcagcacgccctgccttgccttcaggcagggactcaaggagcccagctccgtttctgcctcctccgtgtggctgtctcctccttgttactctgccgctctcattctggctgctgtggccatcatgaactcagacctctctctcctcagctcagtgactgtcacggtctgcatgggcccctgtctccatgcagaaagctcctgtgtcacggggcacacctcatttgtcttcccgctcagggaccacgttcctgtatgactcgttgttcaatgcctgaagaagtgttttatgtattgtgttcagttttctagttgtgtatggtgggagggctaggctgttcctacttagtccatcttttcctggaagtggtagtccccccaagtatgatatagaaggggcaaatgaaagaaagtgccagatagatgaatgatgcgtgacgggatcaccttttattaagtaggttagagtagctgatggttgatttttttatttttattttttatctttttgagacagagtctcactctgtcacccaggctggagtgcaatggtgcagtctcggctcactgcaacctccgcctcctgggtttaagcgattctcctgcctcagcctccggaacatctgggactacgggtatccaccaccatgcctggctaatttttgtatttttagtagagatggggttttaccatgttggccaggctggtctcaaactcctgacctcaagtgatctgcctgcctcggcctcccaaagtgctgggattacaggcgtgagctaccatgctgggcctgatggttgattctttacagtgaataagttgttatgtattaatgagttgttctttcactgaacctaattatcccccccagtggagtttcactttccaacttacacacagcattaatatttaagattacattggtgtatcacattaatagtacagattaaagtttggaagagttcagctttcatgatccctagacaactaatttgcaaggctagatttagagtttctcctttctctgatagaaacatttgcatttcacttgggctttataacgccaggtaggtcagaggttgaaactgaaataattgttaaacacgtaagaggatttaaggataaaatcctcccctgttttggtgttacagatctaaattgggcactcagtcatgtagtgccagagtgcgggatttggctggctaccttaaaggtttagttaattatacagaaatcctctttcagtgttaatcattgttcatgtcctatagaaaatggtctaattgttcttttcatttagctattttgtttaagaaggtcctttctagtctgatttgatttctttcttttttgaaattaggaagtaaagaatacagaaaacatctatttacaattccatcagtatttataaaaacatctgtgtgcccccagcccagtcaagatatagaatatttcagtaccctaggacttctttatgtgttgcaccttgatcccagttactccttttcttaaagaggcaaatacttttcttccttttgttggcaataattatctcttcacttttcttttgagatcgggtctcattctgtctcccagactggagtgcggtggtgtgatcatagctcactgcagcctcgacctcctgggctcaattgatcctctcacctcagcttcccgggtaactgagactgcaggtgcacaccaccacaccaagctaatttttgcattttttgtagagacagggcttcaccgtgttgtccaggctcctctcaaactcctgagctcaagcaatctgcctgccttggcctcccaaagtgctgggattataggcatgagccactatgcccagcctcttcacttttcttaatggttttcctacctgtgcgtctctaaaagttgtacttgcgttttcgtgtgttgcttcttttctcagtatcgtattgataagaatcaggtggttgagaaaaacatttaggtatgctgtagggatagagtaactattttaaattcttttaaacaaaaaaatcaggtgcttgaatatatgttgtttacttctatgtaatatctcatttcatgtgtacatcacaatttacttatccattctactgctgaacaatgttgaaattagcattacatatttattttagagactgcgtctcactctgtcacccaggtgggagtgcagtggcaccatcacggctcactgcagccttgacctcccacggtcaggtgatcttcccacctcagcctcccaagtagccaggactacaggcaggtgccatcatgcctggctaatttttctttgtatttttttgtagagatggggttttgccatgtttcccaggctggtctcgaactcctgggacaaatgagcattcttatatattctggtacacctaagcaggcataggatataagataattatatattttcttcttttttttaaaaaaatgcctgttcaagtcttttgcccagttttctgttgagttgtgtttttcttactgattttaggagcttttatatattttgaatatgtattataaatacctcccagcctgggcaacatagtgaaaccccatctctcaaaaacaaacaaacaaaaaaagtagccgggcatggtggtgcacacctgcagtctcagctacttgggaggctgaggcaggaggatggcttgatcccagcagttccaggctgcagtgagtcgagatcgcaccagcacactccagcctgggtgacagagtgagaccctctctctaaaaaaccaaaaccaaaaacaaatctcaaaatctttccactcggaggcttgttttttcatgttccttatggggtcttttgacattctccattttaatatggtctgataatcagtctgttcctttaaaggttggtgctttttttgcatcttatttaggaactctctttctcccttgatggcatgaagttaatctgtattatctgttaaggctttatgctttttctttcctgtttaagttttgtataaactttgtgtatggtttaaggtggggatctagtttcccatgtggatatctagttgtcttagtagatttttgtgaaaagctcatccttcttcctcagttgcagtgctctgtcgtaggccaagtaggtctgtttgggacttgctgtttatcccattgatctgctggtgtcattggtcagccctagcaccactctgtctgctttaattactagggctttataaaaaatgtgtgaaggaagcacttgtttttcttgagaatgtcttggctattcttgttcttttgttcttcatataggtttaacaattagcttgacgagttcaaagaaagaaaatttggggggtatttgattgggattgcactgagcctatacatcaatttggacagatttgatatcttttcagaattgagacttctggtccacacacatggcatatctcttatttagataggtcttctttaatttccctgaattaagttatatgcttttccctgtagaggtgttgcccatcttttgttggaattcttttaagtacttgatattattttgatgctgtcctaagaggcaactttaaaaaatttaagtttttagcctgttatttggtaggtatataagagtaaaaattattttttatattgctttatatgcagcattcatgatatctccatgtcatcaggagccctggcagccatgcacacagcttcctgcccccttgatcctgaagagtgtgtaaggctgctggggatcggatgcagttatgtaaggggtgtggatgcagaggagccagccgtggtttcatgctggtcttgagtgtcattctaatcatgaggccaccttacacccctctactccaggacatcccacagatcagaaggctcatgggaacccagatggagaaccagctcctagcactggccttccccatttatcttaactggtgcatttccagggcagcagggctgcaagagtcagccctacagctgtctgcccacatgcctgggtcgggggaagttttgggcttcatgtcaattcttgagttcccgagagttcgtgtccaggttgggaataacttgtcccacaaatgcctggtagaacttgcccataaggtcatgtaatccgaaagtgttgtttgtaaaaaaatttttaaagttctgatttaagcttttaagatggttttttttttcttttttctttttttttttttttttgagacggagtctcgctctgtcgcccaggccggactgcggactgcagtggcgcaatctcggctcactgcaagctccgcttcccgggttcacgccattctcctgcctcagcctcccgagtagctgggactacaggcgcccgccaccgcgcccggctaattttttgtatttttttagtagagacggggtttcaccttgttagccaggatggtctcgatctcctgacctcatgatccacccgcctcagcctcccaaagtgctgggattacaggcgtgagccaccgcgcccggccggttttttttttctttttgagtcagttttggcaagttacattttaagaagactttgtctatttcatctaggtttcaaatttataggcataaagttgtttgtaacatcctcttgtgatctttttaaagtcaatgggactgtagtaatgtttcctttttattcctgacattgagatttgtgcgtccactcttttttgttgttgtttttttgagacaagatcttgctttgtcacccaggctggagtgcagtggtgcgatcatggctcactgcagctttgaactcctgagctcaagcggtcttccccgcttagcctcccaagtagctgggactacagatgtgtgccaccaagcccagcttatttaatttttttttttttttttgtagagacagggtcttcttatgtttcttaggctcatcttgaactccttggcctcgagtgatcctcctgccctggcctcccaaagtgctgggattacggatgtgagccaccatgcctggccccctagtttattttatatcttattatttccttttttctactttccttgggtttgttttattaccttttccgccattcttgagggggagattcttgagatgagtacttaccttattagttttcagccatttgtcttttctagtgtatgcacttagcatttagaaatgtaaatgcttaatggcattcaacaagtagtagtttttaaaaatatatttatgtatttcagagacgaggtctccctgtgttacccaggctggtcttgaatcctggctccttccgccttggcctcccaaagtgctgggattataggcatgagccaccatgcctggctggatatacagtatttttgttcagttcaaattattctctaaattttattttgacttgatcaatttattatttaaaagtgttgtaatttttaaacatagaagactttttctaggatttatttttgatttcttaattgcattttgatcagtagacgtctgtcagcagggcagtagcaggtgcaccgcacgtctgtagggggagccatccacaccgttgccatgtgcgaatggcgccccctcgtgttgtggatggtgtaggttgcaccgctgtgtgcacacgtgtgcatacatgcatgcacacgcttggaatttcagctgctctgtcccttataggcccgtgcgtggtcagtttttgtaaatgttccctgtgtacttgaacacgatgcgtgtctacagctgttggtgccaccttttatacgtgtccattaagtcaaatattttatttgtggtgtacaaatcatttacactttactgatttttttgactgtttctatcagtaacagagaggtgtattaacacttctcaccatcattgtaaatatgtctattctccttattagacatatttagatagaattctctgcccatttgtgcttcatttatattttgaggccatattgttgtaaaactgttgtatcttcctggtaaattggagtctatattgttgtaaagtgactctttatccctaataaaactttttgccttacagtctgttttgtctcaggatagttacaccagttttctcttggttagtgtcagtcttgtttatttgtccttttatataagtcaacacttctgtagccttgtatttttcatatgtctcctataaacagcttgtagttggattaaaacagatcagtctgatgatttttgtctttcagttggagcacttagtctacttacagccattggggcctaaatctgccatctcttttgtgctttctatttgtccttcctgtaatgtttttttaaatgcctttttatagattgaaaatatttaatttcttcccttttactatttttgaagcagtgcactgtttttctcttgtaatggtttcttagaaattacagtaggaatactgaaaaaagtacaacgtccgtcatgacctttattcttttcttagacaacccaagacttaggaaattatttaatccgtttgtttcttgtatgtgagtattgctgtgtacagtattttatttttaacatcccaagttaccatccttgttttcggcagtcattgttctttcaggctgatgcacatgcttttgactcttcgctctcctttcctttagcgtctcagaactttcctatggggccacctactttgactgaaagacttcagaattcttttctcatgacggtctactgatgccacattcacttcgttagtctgaaaatatcttttttgtttgtgtgtttttgtttttttgagacagggtctcgctctgttatccaggctagagtaaagtggcatgaccttggctcactgcaacctccacctcctgggttcaagccatcctcccaactcagactgttgtgtagctgggacagcaggtgtgtaccaccacacccagctaatttttgtattttttgtagagacggggttttgccctgtggcccaggcttgtctcgaactcatgggctcaggcgatccacataccttggcctcccaaaatgctgggattacaggcgtgagctcccatgcctggcctctgaaaatgtctttattcagtcataattctttttttttttttttgagatgaagcttcgctctttttgcccaggctggagtgcagtggcacgatctcagctcgctgcaacctctgcctcccaggttcaaatgattctccagcctcatcctcccaagtagctgaaattacaggcatgcaccaccatgtctggctaattttgtatttttagtagagatgggtttcaccgtgttggtcaggctaatcttgaactcctgacctcaggcaatccatctgaactggcctcccaaagtgctgtgattataggcatgagccaccacacccggcctcagttgtcattcttgaaaggtatttttcctagggatggaattctagagtgatgttttcttttagactttgaggacagctgggacctacaggtgcatgccaccacacctggcaagttttacattttttttatagagctagggtcttcctatgtggcccaggcttgtcttgaactgctgggctcaagcagtccccctgcctcggcctcccaaaatgctggcattagaggcgtgagccattgcgcctgactctccagcttatttacagtcctttccacggaagtcactgaagaattggataagtgtacagtctatacttttcatcaagcaatagataaagaggtagcagcagggtgtcatggccagggtgtcaaactgtgtggaagctgcagtccagctctggagctgggcttcatgcccatctccagtgccattctcttcgaagggccttggacctgcagccttcctggagggagagggtgaatagccaagatgcagaatgggctttctttgtaatctggaagacctacgcttaatgaagcagtgtcagtttgaacacttcttaggcttatgcaaacatgtttaggttattttagctgattgaaggcaaaatatggcctgacgctgtgatgtgcggcgcagtcaaatgcgtcagaccctggctgtgttcacagagtgcagcatccagactgagggcggagatagcctctctgctcatgagctgtctctaaagaagcgccctctttaaaaagattgcacgttacattggaatttattcaaggtgcgtggctgagatagtgaagggatgcaaaccgtcatctgaggaacttaagtcagggagctgggttgtttagtgtggagtaaaggatctttcatgagtgagtggttgggggggtggtacatttcactccagatgtcaacagtcattgcgatgttggcactgctttggtcctgagtttcaagggaggaaattgaaggcttgagaggtgaagtaatttgcagaaggtcccctgaactcaggcctgactgtctccaaagtggcgtgtcagctgagggaacacagggtatcttgcagtcgtgatttctgatcaacacaagctgtccagcttcccaacatggccaaacaacaggacagacgtggctgctttccgtgggctctgttgcttctgatttatgtgtgtcttttctctttgagttgaagcattagaaggtgtatccaccaagatccagtaaagaagacagaaaacacaccaggtatctcaaccaagcggatttaggtggggaactggttttacaggctttcgaggggctgaaagggccaaaaggaaaccttgactgagacggtaactacaggaggcaggtgctgctgctagggctgggggaacaaatagaagaggctggagttacttaaatctagatggctagagaagggacccagtgagctggggcttgggccactgaggtagggacacagcctggcgcttgctggcaccgctgctaagtgcacagtgcaggggcctgggagcagaaggaagcaggagggcatgggggcggccggcagctgggaagggaaccatcctccctcctcgcctgccagcctccctggagggtgctggacaggtttgaacttcatgtggtagcagtaattttaaggttttgttttgtccccttgcaactctccttacttgctttgtccccttgcaacttataactaccttacacaggtactctgcattggtactctgcacaggtactcggggttattatttacatatgggatctgagcctcctgtgctttgcccgagttagggcctcaaggactttgtggatcccttcctgatcttttatttatttatttgtttatttatttatttatttattttgagatggagtttcgctcttgttgcccaggctggagtgcaatggtgcgatctcggctcaccgcaacctccgcctcccgggttcaagcgattcttctgcctcagccccctgagtagctgggattacaggcatgcaccaccactctggctaattttgtatttttagtagaggcagggtttctccatgttggtcaggctggtttcgaactcccgacctcaggtgatccgcctgcctcagcctcccaaagtgctgggatcataggcgtgagccaccatgcccggcccttcctgatctttatggcaagaggtttttgccacaacaacacttcacacctgactgaagcccagagaagcccacgtcacgatggctggaggcaaggaagaggatctagtcttttctctctcccagaggcgggagccttatgtccacatcactgtgagcctgctggccttgcccaaggactattcttttaaactaagagagtaaattaagatatttccgaggggtctgggatccatgtaaatgaaaaagttcaaccttttttgtaagccatgttcttaaaaatctgcatgtggggtagttaagtgtcacttactagagtcgaggatttcagcgcaggtctttttgaagttctgagatgaacttctcctcctctttatacttctcattccaaggatgctgagtgtgggattattcctgatgcagtgctgcctagggagaggagcctcagcacggcatctatcatgggctgctttgcttctgtatttagaaagagaactagaattttaaaataattgacttacaactacttagaaaagaaagggccaaatactatgtgcaatcatggcttcctcacggtcaggcatgtttcctgatctcatctcctttttcaggagactctttggaaatacatgcatatatttcattattgggaattaccaataatttaaccacttttgtgctattagacatttaggttgcttctgattttttaatattataactcatgttatgatgagacagtgtataaatctttgttcagatttctggttattttctcagtatggtttctggaagtgatagaaataactggataaataataaataacctttaggggaattggcacgttttgcaaaattgctgtttgggaagtttgtcccattttatgtgcccgctcgtggggtctgagggaggctttttcctggctcggctgccagccctgggcattgccatttgaaaatacctttgcaattaagtagacgcttgaccgtttcattgttttaattatacttttcgattattagtgtagttgagtatttttacatatgtttatgggtcagtttcattatgtttaattgtttatgcccttcgtccacttgtaagtaaaacagtgaagagtgacccgtgtggggttttttgtgttttgttttggagacagggtcccactccgttgcctggggtggagtgcagtggcataatcacagttcgctgtagcctcgaactcctcagctccagcaatcttcccacctcagcctcccgagtagctgggaccacaggtgcatgccaccatacccggctaattttttatttttattttttgtagatacggggtctccctatgttgcctaggctggtctcaaacttctgagctaaagtgatcctcccatctcagcctcctaaagtgctggggttgcaggcatgagccaccatgcctagcctgtgtggcctttcatactaggtgaatctgtggccacccacatcctgagaattgttttgttcctcttccaacctagaggaaggtccccttggaagtgtggcttggggctctgtgattgaacctttcctattcatcattttcgtcagtgtgttggatacagatttggaaggcgtgattactgagtgctgatgatataaagctgggaaggacaggtactaatgtagatgaaagactcgtgatttactccaatcttgaaaggatgacatgctggcagattgtggtaaaatataacagagatactttgaaagtcctgcatttagtcttccctttctctcccttgctcccttcctcccttgctttctttcttccttccttccttccccctttatttgtcccatcaattgcgtaaatgcaggtaaacatttagccattcctgtgaaagccgctgtgtatgtggtggccttaatcattgtccatttttgggcctgtggatccctgttattctctgcagtggagactgcacatcgggccagtgcatgcctgctattctctgcagtggagaccgcacatcaggccagtgcatgcctgctattctctgcagtggataccgcacatcgggccagtgcatgcctgctattctctgcagtggagaccgcacatcgggccagtgcatgcctgctattctctgcagtggagaccgcacatcgggccagtgcatgcctgctattctctgcagtggagactgcacatcgggccagtgcatgcctgttattctctgcagtggagactgcacattgggccagtgcatgcctgctattctctgcagtggatactgcacatcgggcctgtggatccctgttattctctgcagtggagactgctcatggagcatctgattttcttctggaccttctattttgagctgcattcacagagcacacctgagaaatggtggccaaggggagtgatctaggaccctgagaaacctggaagcagctccccttagggagagttgcagagggctggggatgttgaaggagagagaaggctctggaggaacttggatactcctttccaggctgagaagtgctgccctgggcactagagagggagagctctggccatggcttctgagggccagctgcaagtggacactgccatgggacaaacagcctcatctcactcattgaacattccaggaggaactaaatgacccctctcaggatgtcacgggatttctatgttgctggaaagatgcttgtggtggaagcgtggttactaggtggacctggattcagaggacagctcagctgattcctggcttgtggacttagatgggttgaacctttaaacactcagaacatcagtttcctgtaaggtggggtaagaatgcgtgtgtactgtgattgatgtgaataaaaggagcactgttgccaagtccctgagtgcagacccagcaggttggaaccacttcttttctgttccctgaacaattggactgtgtggacgcagatcctgcttccctgagctgcacggccctctctgatcgcacatacatgtgtgcatctgacacatatgcttgagtgtgagggtgacagcggtcagacaaatgggcttttttttttttttttttttttgagacagcgtcttgctctgttgcccaggctggagtgcaatggcgtgatctcggctcactgcaacctccgtctcctgggttcaagcgattctcctgcctcagcctcccgagtagttgggactacaggcgcccgccaccatgcctggctaatttttatattttcaatagagacggggtttcaccatgttggccaggatggtctcgatctcttgacctcgtgatccgcccgcctcagcctcccaaagtgctgggattacaggcgtgagccaccgcgcatggccaaatgggctgttttaaatctattagaaaaatttttcacaatttttagtctctattattctttctttttttttctttttttttttttgagacggggtcccactctatcacccaggcttgacagagtgcagtggtgtgatcttggctcactgcaactttcacctcccaggttcaagcaatcctctcacttcagcctcctgagtagctgggaccccaggcatgcgccaccacgcctggctaaatattctcagttatactttcagtacacataaaggcagttgtcaaccaagctgtttgttagaaaatgctaactgtggtccctgtccactgcctctttcctgttttttttttttttttttttttttgagacagagtcttgctctgttgcccaggctggagtgcagtggcgcgatcaccgctcattgcagcttctgcttccttggttcaagtgattctcccctgcctcagcctcctgagtagctgggattacaggtgggcaccatcatgccaggctaatttttctacatttagtagagatggggttttgccatgttggccaggctggtcccaaactcctgacctcaagtgatctgcaagccttagcctcccaaagtgccgggattataggtgtgagccactgcgcccagctgttcactgcctctttctgaggcctgtcccacgtgggaccttgtgagctggtggaggcctcttgagggctggcaggagcctgtgctacctctgggcccagcacctatgctcccgggagccgtcccgcctcttgccttcagtcttcatctgtactgtgaggatcatccactggcctcccaacccggtagtgaagggggaataacaaggacgtctctggaaagtgctgcaggttcccctgaggaaagctattgtagagtagaaacgagaatgcacccccggaatcagctctccgatgatatgcaggtgcagctgcctccagccctgccgttggtcaggaggaggcaaggggtacctaatgtgctcttatttggcccatgatgagtggagaaagagacctttgcccaggtgtccatgtcactgaggcagtggcggagggtgtcccccagctctgcagtggtcaccctctgcctcctgtcctcgggcagctgcctgtggctgcaggcggtgaaggtgctgttggttgtttgctcccagacctggctgtggggcctgctctgcagaggtcaggggcatggcgcagggggacccagcagggagctggagccaggcagtgcgggctgagccaggccgaggagacccccgcttttatcttgagtgttgtcatctgatgctgagttctttctcagcagtgaaggggaatcagtgtcctgacttgaattgcactttgatggggtttttagtttctgtgtgttggatttttactgagagctctagagaaactagtcacctgggggtttcagaggagggttgtgaagtgctgaatttttctttgagcttttaaggtcagaactcaggggagctaaaaaaaaatgaaaaaataataatttaaaccttataaggtgactcataaataactgcctttcaagatgagtggaattcttctgggaaaaagccctgtggaaattctcctgaccaccgagaacaaagaggaccactgctataaaaacctccagaatcatcatctgcggatggagggaagactctgccaggagtgcgatttttcctttatgtgttactccgtttaccatgtctcaataaaatggcagagaaagtccttttcctgtgtttcatttttcccacaacctttccccttttgacttctttggggcttccccttatctgagactggcccaccgcagaattcagcttcacgggcctgtccggatggaacgtggacgccatcatgtgtttactgcttttatctcttagccacttagaaacattgttaccatgagaaaatgggaattatgctttgatccttgagttaaatcgaggctgtggtagctggtgagttatgaggctttattaaaataaatgatcttggatgtgttgggtattcactggcaagatgttaccagaactcaaacatttaagataagccacatattatttgtatggattcataaaatatagaaagagcgtgagctggctatggctgggttttgtatcctttcccccaactctgttacacttttctgaaagaaaatgagactttgcttttatgtgaatagctgtagaaagctagggaggggtgccatttggaaattgaattaaaaccaaattatgtaagaatgtggttagttttataatatcctgttcttgtttcagtgctttggtttattattattattattattattattattattattatttttgtttttttttttcctgagatggagtcttgctctgtcgcccaggttggagtgcagtggtgcgatctcgactcactgcaaactccgcttcccgggttcaagcgattctcctgcctcagcctcctgagtagctgagattataggcacgcgccacctcgcccagctaatttttgtattttttagtagagacagggtttcatcatgttggccaggctggtcttgaactcctgacctcatgatccatccgccttaacctcccaaagtgctgggattacaggcgtgagccaccgcggctggccggtttattattttttcctcagtgccgtggaggcgcacagggctgctgcacccgttagggtggccctgggtcctacagccccgggcacacggtgcacagcacttgcgtagggtggtcctgagtgtgcacgctgctacgtcgctcaggcttatgtgccttaagcagttgcatagtttaggcacagtgctgcttctcaaagtgaattctacttggagccacttatatatagattagattttataatgtgtaatatgaagaggagcctggaggtatacttaatttaggaattatattatttttggtttgggttttaaagtatttgaatgcctgttaaaccaattctgtagtggctagaggttcaaaatttgtagtatttatgaaaaatactcattctaagtctgcttccttttataatttaggtatatacactctctgttcagaattcctcaatacaacgcattaaatattgttccgaggtcttctgagccccgttctcagtggtggccgtgagctaacatttccacatctgtcacaatgttgtttgcagtttgtcgggaggcgctctgcagccaggcagatggaggggccgctaggcaggatgttgcgagtctgtgagggcatcaatcccccgtttctggcatagatttaattgtttggttcaactgggaagccatatattaacttctacttcaacccatcctgatctctccacagatgctagttttatacaggcctatttttctctgaaattgagcctgagagacaaaaatccacacttgggctgtcatagattttggtaaattgagtcttgtgactgattggtgcctcctgcctgccccgtgatcctgtatgtagtaaccacgtcgtgatcacaggtcatggattggggaaagttgcctccaaagatgtgggtgtctgtttttcactccactttccatttggccaaaaattcaacacttcagtttctgtttcaaaaaagtaacaaagaattaaaaggaaaaaagcagtaagaaagtttgggccatggtggtgctctggtacccgccttcctgtttctgcctgtgtcgctctggctgggcagggtccgggcatggcagccctcccctctctcctccccctctgccatgggggcctgtggttcagctgccaggcgggaactgaagagcagccccgggcgctgcagcttcctgtcctgcccatcacggtcagggacgccggtgtccgttccttctactccaagtctgtcccgagtttgaatgttcagatgccaccagcagctctttagggtctggaccaaacgtctgatttttcctctactaacctgatatgtttctcatggcctttctcgcctttttgccatgtgtgatagctgttcctgttccttggactggattttcacgggctcgctggcaagcaggtcctgcatagcatgctcagcatgtagctgtgctccgcgtctgccggatgaacacacgagccggtcatgggccacgtcagcaatgttctcgacctttgtaagcttcgagaatgtgctgtgtgtacagaaggacgcgcagccaagtatgcggtggaatatccagaaacaacacggggcttgtcgggtgcagacggggcgcctcaccggcccggcgcagccccgctcgcccctctggcctcccccgcagttcccctttcctggttgtgcagcatgcactcgcttgcctttttcttttctcacagttttatcaactgtttgtgcatccccgaaataatacagctttgcctggtgtggaaacgtatataaacattatcatagtatctgcgctcttttgtgtcttgtaagacacccgagatcgattctgttgccgtgtgtagcggcggttattcttgctgttgtcgtgagccattgaatacagtgtcgaacacttgggttgcccagtgtgtgtgtatgatgaatagtgctgctataagtgtttttatatatgaattttggttagcacctgtgtggattttcgggaggtagttgcctaggagtggaattgcgtagtaatcgggttgggttttagctgaggttgtttctgctgcaccacactccggcccacactgttacgcatttttactgtgttcattcctgtgggtatgtattatatcatggctgtaatttacttccccctggccccgactttgaaaagttgtatttatttatgagatacaatgtgatgttttgatagatatatacattggggaatgattaaatcgagcttattaacaaccatcaccacacatatgtatcttttttttttttggtggtgagaccatttgcaatctctttgcaattttaaaatatatagtgttattaactatagtcagcatgctgcatagtagatctctgaacttactctctgtccaactgaaggcttgtgccttttgaccaacatctcccctaccccttccacccactaacctctggtgaccaccattctactctgcttctgtgagtttcgtttttttagatttctcatgtaagtgacatcatgtggtgtttgtccttctgtggcttatttcacttaacgtaatgtcctcctggttcatccatgttgttgcaaatgacaggatttccttcttttttttaatggctgagtagtattccatggtgcatgtatatcacattttctttatccattcttttttttttttttgagatggaatctcgccatgtcgccccggctggagtgcagtggtgtaatctcggctcactgcaacctccgcctctcggggtcaggcaattctcctgcctcagtctcctgagtagctgggattacaggtgttcaccaccacgcctggctaatttttgtatttttagtagagatggggtttcaccatgttggtcaggttggtctcaaactcctgacctcaggtgatctgccctcctcagcctcccagtgttgggattacaggagtgagccaccacgtctggcctatccactcattttttgttggacaccttggtacattccatatctcggctattgtgaaccacactgcaatgaacatgggtatgcagatgtgtcttgaacatgccgatttcaattcctttggatatatatacccagaggcagaattgctggattctatatggaagttctgtttttcattttcattttcttcatgactaatgaaattacacaccttttcatactcttactggtgattttgttaggatcttttgtgatgtacctgttgaggatttttgcccttttcctgttgtattgtttcttattgatttgtaggaattctttaaacattctggataacgtccttttaaaatgtgtttatatgtggaacatttcttgtcctgtgaaacatctctgtgatgcaatatttcagtctttttatggtctctcttgataaacagaaatatgtagttctattctagtttaatgtgtaagtgctttccctgtgttttatgcttgtgttgaaatattttccaaccttaaggtcaagattttgtcccataatgtaccctaaaagcttcatagttttgttttttacatttaggtccctaacgagggtgactgccagtccctgtgtgcccagggcagtcctagggatgaataattaccatgtattaataatcacgccagtctatggcccatccggcattggctttgcatatggtatgaagtaagggcccagttttgctctgttgcatatgaattttaatttgtcccagctcctttcacttgcagggactatgatgactcctctgcaggccgtctttgcgggaactaagggctgagacgcgcctgggtctgtttctggccctttgtgctgttccgggggtacttctctctgtgtgccagcttcacactcctgtctctgtggctgctgatggtctgaaaaagcacatctccccatttggatcctccagagtttcttgactccctgtgtccctttgcatttccatagaaattttaaaatcggtgggtcaagttcactgagaggcagaaaaacatattgaggctttgattgtgatttaatcatatctgtaggtccatagatcatttaggcagagacttgacatcttttcaatattaatttttctaatttttcatgtagaagtttttcacatcttttgttagatttattcttagatacttttgttagatatattcccagaattttaaaatgctattttgatgagtcttagaaattgtgtgttgtttgttctggtgcataggaatgcagtatacagttttcgttttgttttttttcaatcgactgatttgtatccagcaaccttacagaatattttaatttgaatattcacatatttatttggatttctataaacacagtcatggtcttctgtaaataatgacagtccctcctaccccatctttatactttctctcttttttctatctgtgctacactgaccaggactagtgttgaataaatgtgggggcatccttaacttttttcttatcccaaaggggaacacatttaccctattaaatacgattttttgagctaatttcgtaggcaatctccatcagattaaggaaggtttctttcttgcttataagcgttatttctttaatgagtggttattgaattttagtaaatgcttttttgtgcatctatcaagatgatcatatgctttttctcctttaatttgttagcatggtaaagtaggcatgcaggtatgcgcacatgcgtgcacacagtgtctttaatggttgagctgtgtgttagcatggtgaaggaggcatgcaggtatgcacacatgcgtgcacacagtgtctttaatggttgggccgtgtgttagcatggtgaaggaagcacgcaggtatgcgcacatgcatgcacacagtgtctttaatggttgagccgtgtgttagcatggtgaagtaggcatgcaggtatgcgcacacacgtgcacacagtgtctttaatggttgagccgtgtgttagcatggtaaagtaggcatgcaggtatgcgcacatgcgtgcacacagtgtctttaatggttgagctgtgtgttagcatggtgaaggaggcatgcaggtatgcgcacatgcgtgcacacagtgtctttaatggttgggccgtgtgttagcatggtgaaggaggcatgcaggtatgcgcacatgcgtgcacacagtgtctttaatggttggggctgccttgcatttcaggtataatctgtctacactttttatgcatttctgggtttggtttaatatttttgtaactctttttttaaagtaagtgacctgtaattttttcctgtacagtttttgttgggttttaacaccaaggtcatgctattccaaaaatatgagtttgaggagtgtttttctattttttttctgcctctggcttttagcaagatttgtagaacttccagttactcatctgggtcttgagttttctctgtggaatgatttttttaaattatgatttgtttctaaaatgattatcatgtcttctatgcctttatgagtcagttttggtgagttgtgtttttctagtacttgtctttttctttgttacttaaaaagtttagtggcatagagttgttcaaagtcacctcttgtcaatgtggatagttctctcttttagaattctgtaccgtggttttgcctgcctgcctgcccagccccctcccctcccctcccttcccttcccctcccctctcctcccctctcctcccatctcctcccctctcctcccctctcctcccctctcctcccctctcctcccctctcctcccctctcctcccctctcctcccttcccttctgttcccttcccctcctctccttctttcttttctttctctccttcttttttttggagacagagttttgttctttctttccttcctttctttttttcttttttttttggagatggagtgttgctctgtcacccaggctgtagtgcagtggcgtgatctcggctcactgcaacctctgcaacctgggttcaagtgattctcctgcctcagcctcccgagtagctgggactacaggcgcacaccacaacacccagctcatttttgtaattttagtagagatggggtttcaccctgttgcccagggtggtctcgaactcctgagctcaggcaatccacctgccttagcctcccaaagtgctaggattacaggcttcagccaccgtgtccagcctttctttcttgattagtcttactagagcaggcatggggatgatagtgaaaatgttgctttttatgaataaagcacagaagtgtgtgcagtgcacaaacagaaacatcatatacctgcgatgtcaacatttcatgggagggggattagggaaaagattaggggaaagattgggcgataataaaatagaggttgagagtcactgcatgagaggctggttcttttcagggaaccagcttgtggctttgtggatcttctttgttatctgtttgctttcattctgtcagctttggatccttccttccttttactttctctgggtctgtcttcttgtgatggatgcttactcatcctcagctttctttcttctcttacatttgtattaatggctatacttttccctcccagtgcagctttgctttttcccactgggttttatttgtctctctcatttgaagtaggctggagcgagtgtggcctagttcagaaatagaaggctggtttggctgtagctgtgagtgaggaggagagcagtagattaggtaggagagagaggcctagactaaattgtgtctgggcttgcagacctgggtaaggaactaaatacaactcaggtgtgctagagatccgctgtgtggtttcatgcagggggtgttgtgatctgctttatatttaagagactagagtaagggatcgtaggggtaggagtggaagggagaagagtgctcagaggctgctctagtgcaggggcaagacgctggaggcttgccctgggtgtgatggcggtgggaggacaggttctggatttgtgtgcatctgggaagggaacaggatatgactgcccagttcagcaagctcgtttaggatacttttattgggcagctcattaactgttctctgtggcccagtggatctcagtaagctggagctttgtaattttcacttatctctatgattgtttagtgtcctaacagaatgggagatttatttgggtaaagagggcctagaaacatttaagtattcccgtgatgctggccataaatacagaaaatttggtgcagtatgtcttcacattcctacaaatttagtgtagttcagttctcaaaccatgctggtagtatcctgggggtcttcaggacccttttgggggtttgtgaggtcggttgctaggacaggcctgcgtttccctggcgcctggatctgcactgatggcgggcgcaatggcgggcagtgctgtcggagtcttagtggctcccagttgacccagtcgttgcatccatgatagcctcataactggccgcaaaaacacactacttgtgtcaaatctgggcccttctgcacgtgtttttaccccactgagtgcctttgcacagactgcgatctgctggttgctgagggacaggcactagtgggatccgggaggggcctgttggttttccccgtgggatgctgcttttccctgaaagaataagagacaggatgaagtgagcttgtcacttcaaggaaaacaactgatggcaattgttgccagtgataaaaattgagctttcaactgtaaattaaattagaattttaaaaaacctgtgtcttccacggtgaacttgtcaggttaccagcctgttctgaggcctgttctgatgagaccgcggcggccatgctgggtgtgtttgatgctgcagaagagctctgcacagctcggtgagcccatctttccacatgaccagtgcgtgctgttacaacaccatgtgtgggtaaagagccacttcaagcaccagctaggacagagggtctcaatgtaacagagtatgaaaaagctactgaaacagtttccttatccaacaaaccgcttgtggagttttggtgtgtatcaaacaatactgacaattatttcaaaagactacgtatacatgtgcagctccatatgtgatgctggattttcttcctgtgcttcagttgaatcaatgtattacagcagattaaatacaattgcaaaggtgagaatccagtgacttctattcctgagccagacagtaaagagatttgcaacaatgaaaaacattgccactcttttcactaaaattttttgtttgggaaaatagtttcatttttaataaaaatgtcattcatgttaacctgtaacaggctttttattgttaatttgaaatgaattaatacaaatgagaagaccctcatttcaatgtataacatggtaacatttggtagtgataattgggaaggggcgtctttggactcctccgtgattctaaagagtgtgaagggaccttgagactgaaaaatccgagaactaccggtttatagaagtggaagcatttagtgatattgccgttcgttcctttctttccttccttcctttctttttttctttcctctttctttctcttctcttctcttttctcttttcttttctttcattttgagacagagtctcgctctatcacccaggctgcagtgcagtggtgcgatctcggctcaccacaacctctgcctcctgggttcaagccattctcctgcctcagcctcccgagtagctgggattagaggtgcgtgccaccatgcccggctaatttttgtattttgagtagagatggggtttcaccatgttggccaggctggtcttgaattcctgacctcatgatccacccaccttggccgcccaaagtgctgggattacaggcgtgagccaccacgcccggccgtgcagttctttaaacgtaggaaatgacctttgagttttgagttcgataccagcgtttctactattaaaggtggactttctctgtcaatgttcttggaatcttatgctttccacgaagtccttgcacttgtgcagaactgtatccccttagccatgtgaactgcacggagcaacgctgttgcaggatttccttctgcctcactcagaacatatgtgctctgtgtgtgaagaagctcgtcaggctgtgagcacagcacaagaataaagcctttagaactcagcagagagaaccagccattactgaaaatggaatgttttaattaaaaatatccatcaccgggtggctcttcttttcctttatttctcaagtgtggcaaatgttaataacagtggctgcactgtggctccatggtaaattgccagttggtgagtaggatttctcccatgaagcttagagatgaacccctgcaacatctgttcttgtgacaacgaatcccttttttactttggcttatgcatatttcagaggttagagacaggaggctccttctaaaagtgttcagtaactgcctgggctgatgtgtgtgcctgagagtcagagagagagagggagaaagagaatgggggctaaggggaacaagaagggagagagagagagagagggagagagaatgggcactagggagaagagaaagagagagagagacggggaatgggtgggagcatatgaattcattggtaaccctttcactttcttttcttcctgtattaattgatgggttgaccttattaagtgggttgattttggggtttctactgcagtgtaacaatgagcatgcagatggattttctgattgtttacaaggaaatcaacctttacactagctccagcttttttcttaaacatctagttctattagaaaaaaagcaaaagcacagcagatagaagtcttgaagcctgcagtaaaacactgtggctttccattgtgaggacgtgcctgttctttattacacacaggctgcttctgtgatctgctgagttgggcagtgtcatcttagcagacagggtttttccccccccttagatggggtctcgctcattcgcccaggctagagtgcggtggcatgatcatggctcactgcagcctcaacctcctgggctcaggtgatcctcccacctcagccttctgagtagcagggaccacaggtgtgcaccaccaacatctggctagtttttaaaatatttgtagagaccagggctctctgtgttgcccaggctggtctcaaactcctgggctcaagcaatcctccaacttcggcctcccaaagtgttgggattttgggcatgagccatcgtgcccagtggcaggagggtttttatgtacatgtgcttgccctttgtcaggggggtggggtgtggctttggttttgatattttcactggtactgccaggctattttgattcttcttataggagtcttgaccgtcaaccacctgccatgctgtttgggatgcagtgttttgaggatatccctggggactttactaaatggacctatacaagttgataggccttgacaacttttctcttactgtagtttttgttttattaccatttaaaactaaaggctagggagatgagccgtcctagattgaacgtgcttattagcgtggatatgttgtgaagaaatgcacgttggaaaacatggtcctccagaagcaattaacttggcagctattttgtttacattttctatgattaatatttacattttattttaagaaaattggttttttgctgccttgatctcatgctcacattttcctggttgagattggaaccaataagtaaagaaaattgacctatcaacccttttaaatgttagaaacctaagtcagagagaactgtgttaaaagaactgtgtttatctttttggttaaacctgttgtaacactgtgtggttaaattttccctttgtgctctcttcccctaatcgttcaaaggatagtgggcactattaggttcgacttttttttttaaatgtttatcttagtggtgggtcctcttatgggctagtcatttgtgggcataggttggggtgtgcagggtttatggctaattataggatcatatgtagtggttctctgtgatcaggagaaggataccaaggtttctattttacttatttattaggttgtgtaacttttttcttttattcttttatgcttgatgatggtgttggtgtttaggaacccctgtttagaaagcattttggagaaaacctgatgcaattttaattttgatgatgtcaatatctcattagataaggccttgataaaataacacctttttctcttatttcaatggatccaaagagaggctagcttggaagtggagtggtggtgatcaggaagggactcaccaccacgccacagggttgtcacatattttcctcaaagcaaaatgtaatttcctcttaaaagaggatttagatcctggcattttagcagctgtttttaaggcctggagctttggtattcctggctgttttgggaggcagtgctggacagccgattcgttcagcaggtgttgattgtgtgctgacttttgtttggcagtatttggtctgacatgggagggagtttgcaagaagcttacagcatcatttcatatggttggaaccccaagtgtgggactagcacacctaaaacagggacgcacagaaagggaaggcagctgtgattaaaccttgaagctcgtagtaccaagctcaagcctcggcatttggcagtaggagaggtgcagaatggttgggagagcctcgtagaggggatggaacttgagctgggacttgaagaaggctgagagaagggacagggaatgcggagtttagggagggtgttcacagagattttgagaggaaaccgagcatggctttttcatggaactgtgtgagtgtctgcatggcttgggtggggatgactaacttgactcaaattactcatccctgggccagactgcggtagcctggggaccaggtgaaggaatctcaaccttatattgtaaaggcaatggggagcagtgaaagttttaaataggtgaaagataggctttgttttctcttttctttttcttatcctttttgtttgtttttgagacagggtcttaccctgttgcccaggctggagtgcagtgcgatctcggctcactgcaacctctggctcctggctcctcagctacctaggtagctggaactacaggcatgtaccttcacacccagctaattttttgtttattttttgtagagacaaggtctcactatgttgcccaagctggtctcgaactcctgagtttaagccatctgcctgccttggcctcccagagtgttgagattacaggtgtgagatgctgtgcctggccatgttttttttgtttttggttttttttttcctaaagattcatctgactgtatgtggtgtttcacacctgcaatcccagcactttgggaggctgagaccagttgatcccttgagcccagcagttcaagaccagcctgggccacatagtgaaatgccatctctacaaaaaaattaaaaatattagctgggtgtggtggtgcacacctgtagtcccagctacttaggaggctgaggtgggaggatctcttgagtccatcaggctgaggccaccgtgagccgtgatcatgccactgcactctagcctgggcatcggagtgaaaccctgtctcaaaaaaaaagattcgtctgcttgagatgtggggcgtgtggaaggaagtagaccagtggatacggtcacccaaagcatgatgggaattccagatactatatgatgccatttcaacatggaggagtagaaatggtgatgaaggtaaagagaccacagcagagaggcgtctagaaagaaattaatggctctgacaacttatttaatagaagtggtggggtgtggggcagcccaagataacaaatgtaattttcagggcaattcatggatggaggaagaatcaattcagatttctgggttgtactgtttttgatattgtattctaagatggtcattgcttcttattaggagacaaaaaggtttttaaaaatgtgaaggtcatctgcagttttttggggtgagagagtcctcaggaacgttcgcatttgcagatgcccaagagccttgagtccaagttgctgatcttttgcgcagggtggttctgccgcagtctgcgaggcttctggagggcctcgtgagcttgcagctctgtgatcctgctgacaaactggtttctttccacatgtggaatctgtgttttccctgcatggagcagtgaatggggatgtgaaaggcaccggacatgaagctgataccgtcacagtagaatccagaagagctgctcagtaaaacagcttatacattaactgttcagacgctagaaaaggcttgtattgcttattgaccttaaactttcttgattctttctatctatctatctatctatctatctatctatctatctatctatctttttgagactgggtcttgctctgttgcccaggctgaaatgcagtgttgtgatcactgcagcctcaacctcctgagctcatgcagtcctcccaccccagccccccgggaagctggcagatggtgttgtcctcacatggccacaggcaagctcttcttataatgtgaccttgacacttctgccattgtgagtagggtccctgttccctcccgttgaatctgggctgactcgggactgtagaccaggttataaaaggctctcccctggatctgctggggcgtgtgctgtgaggaaaccccgcagccatgcggtgaggccctgtgaaggtgagccaccatgcagtgattccagcccccagaagacactcacccccagacttaagtcttcccagctgaggccccctgagacctgtggcgccctttcctaattcttgaccatgggacctgtgagcataatgaaatgattgttttgtgctgctaagtaaagggaggtttgttaagcagcagtggataacttgaacatgttttggaagctggagccaggtgtggccataatcaaatcccaatgcctgcagctctggctttgggatggggtgttgggcagaagcctccgggcctccaggagagtgctgctggctgcctgaagggcctcctagaaggtaatagggtctagtattttagcctgtgggtggcacatgatgactgtccctgctactctgccaatgtgagaaggcactgcagacggtgtccaccacatgggtgccctggatttggtcctcagcaggctgggcttggcctactggctgccttttgcctaccccggaaggaaaggagggaacgtgtcattgcacgctggaggaaaggggccccttgttaggtggtggtgggaagcctggtgtcattgttgctgtgggaaagaggaaagtatgtgtgtatttaatgaacttgctcatctagtttaggagatttccaggcagaaaattcaaagtgccacctggcttctccttggtgtaaaggaagaggacttcctgggttcaaaaataagactgtttctcattcccagcctcttctccaggctcctcaagtgaagaaagggcttccggcaaaatgcatctggactgggctgtgagctccgttcctaaggcttcagattgagatccaagtgcagtgtctggcctttcagctggaggagaggcctgcagattcttgcattaaatcccgtctggcctctaagagtccaaagggcgttgtcatgccacagcctcttctgggagcccaggaggtaaagggcttgtctctttatgggtgtggcttgtctaatggaggagattatgagttaatacacaaaaaggccaccaagtgtttttaaagaaattatgtgtctgcctggactgaaaggagcagaggcaatacaaaatgaaaataagtctttgggcccccagacttctgtgaggaggaagcaggctgtgaaaatcacccagctgtaaatgtggggtacttttcatggaaaatgaagtatatctgagaaggcggagctgagatcccagaaaacaagccccaggtaccaggacagagccctgatggaggtgctggcgctgtgtgcctgcctcgagtggctgtcctgggtgggacattgtgtgtggggtgtgggtgtgtctgggtcagctctttagacctggattgggaagaacggggatggaagaggggtggacttgaggaactgcatgttcctgcacacaggcttctcagctgggcagggtttaggtgacgagaccccagacttcaagctgatagcagtaatcggacaggccttgggggccctggggaggtgtcaggttcattttgcatgtgggaggatgtgacgtgtggtggccagaggatggacagtggcagatcgtattttccagagatgaccgcagcagcatctcccgccgcacgtgccctctctgcagtgtaactgtgaaacgcctcccaagatgaccgcagcagcgtctcccgccgcacgtgccctctctgcagtgtaactgtgaaacgcctcccattgagaggcgaagttgctgttctttcccttggatctggatgggctgtgactggatgggaaatggcgctcttggctggtgtgctgaggacgacataccgttcacctggttctctcagaacccaagaccagccccatcggagaggctgccagaggaggccatgggaggaggtggtttctcattaacagcgaccaccactgtcagccgccagatgtgtgagtggtgaagcttctggtggtgccagtgccagccactgagccatcaccggcctttgcatcttgcctgctgaggacccggacattgtggagcagagacagggtgtcccctcccttcccttcctgaattcctgcccctgcaggaaggagaaaatgattgctggccatcactgagggttggggacctggctgtgcagccgcagcgccggcgggccgctctcccacatctcaggggcacgcaggttccgtgccagggatggctggtcaggccccgcagatgggcagaacttctcatcccacacatcccagccttctttaaacttccctggcagattattttatggttttgctgctgttggtgaagatggttcagtctttttttttttttttttaaatttatttttttattgataattcttgggtgtttctcacagagggggatttggcagggtcatgggacaatagtggagggaaggtcagcagataaacaagtgaacaaaggtctctggttttcctaggcagaggaccctgcggccttccgcagtgtttgtgtccctgattacttgagattagggattggtgatgactcttaacgagcatgctgccttcaagcatctgtttaacaaagcacatcttgcaccgcccttaatccatttaaccctgagtggacacagcacatgtttcagagagcacagggttgggggtaaggtcacagatcaacaggatcccaaggcagaggaatttttcttagtgcagaacaaaatgaaaagtctcccatgtctacttctttctacacagacacggcaaccatccgatttctcaatcttttccccacctttcccgcctttctattccacaaagccgccattgtcatcctggcccgttctcaatgagctgttgggcacacctcccagacggggtggtggccggacagaggggctcctcacttcccagtaggggcggccgggcagaggcgcccctcacctcctgggcagggcggctggccgggcggggggctgacccccccacctccctcccggacggggcggctggccggtcggggggctgaccccccacctccctcccggacggggcggctggccaggcagaggggctcctcacttcccagtaggggcggccgggcagaggcgcccctcacctcccggacggggcggctggctgggcaggggggctgacccccccacctccctcccggacggggcggctggccgggcggggggctgacccccccacctccctcgcggacggggcggctggccgggcagaggggctggttcagttttcttttctttttttttggtgggggggagttttataactttatttgatgtatttgatgatcagcgattagttctcatccacattgactgtctgtagatttttgaacatggtaacaggtacataggtaaccaaagtatagaacttatttggtgaatcttcatcctcattacattttctggataaccacgcacggatgcggtaggggacattccttattcctttggcccagacagctttgttgagcctggtgtcaatgcacacatctggagttgccatctccttcatgtcaaatttccgaatctctctgagtgcccaaggggcacgcttcatgaagcccactccgtggacgcgctggtgaatgttgatggtgtcttctcgggtcaccacctcgctgattgcagaatggccgtttttcttctcgccatccttttctgcgggagccattctgccgggtccaagttggaaaggaaaaggacagttgagttttcttgggttgtccattggatgatcatcccagatgggttctttgtacttctcgtgttcacatggtttagggatgtttttctgatgagtggtggaaagtaggaactattcatggtggctggatttggcgcctgtctccctcatcatgctgtttatttttgtcatgaaaaacatctttatcaataagattaatctcacttttacccagacaatgtaacctgtagacttcgttgagtaaaattggaaataattttaaatctaatttatcttgttgtcaaaccaagagaaacctatcaagaaaccgctaaagcagtgagagctcagaatgaggaggtcgtggcataaaaggtgatttttctgggagcttcacatctaggcgatggtctaatttgtactaagtgcgaacacgcattgaattcagggaactgggaaagcacgcgtgtttgaccctgcgcgctttgcaagaagctcgtgggggttggtgcatcctttgaagggttaagggaacgaggggtgaaaagttgattattgtttggttgtgcaaatgtggtgctgggtggagtccccaagaccacttcctgcttccaggatttactgggagtactcacaggactcaggatctaatactcatgggcatgatttattacagtagaaagataacgaagcaaaaccagctaggcgaaagggtgcatggggtgaggtctgaagggaaccaggcacaagtttctgaaagccccgcccccatggaggctcacaggaggggctaatttcccccagaacaaggtagaccaatacaaggtagtgaaatgttgccagccaaagaagcgcatccgagacttagcccccagggtttttactggaggctggtgacaggtagcctttgccaaaatcccagccttctggcaggaaagcaggcattcagcataaaccatattgttggaaaacagttgaggcacagcgaaccccacttactagttagggtggtgggaatcctccagaaatccaagtccgcagaccccagccacgggccacccctgtaagcagggctttgaaaggagggctgctggggcctgctttcttaaccctcttctgcacagataccaacttatcctttcctttctgattaatgtctctcaaacacagacgggggaataaaaacctgaaaacaagcgaatattgacatgtacatcaccactttcaatcagctattttcaaccaagtgctgaagtataatacagttgtagtcacaaaggggaagtagcaggtatgttgcaagaaaaaacttattagaattgtatgttaacttggatagaaacagaacttttctgagcttatgtgctgtgcagatacagaatgctggcagagttacttctgtgagaacatcattgaattacaattaaatattaagtacctataaaatatctttgcattacaaaagtggttaaagtaactttctcagtcttcataaatgtagatagtatctttggacaaaataatgagttagtcttttgatggaacaggagaagcaggagaaaattgttccaggagcagggttgctgacgatgctgtccctgttggtccagaaggtaaaatcctcctgtattagtctgttctcacgccgctaataaagacataccagagacagggtaatttataaaggaaagaggtttaatggaatcacagttcctcatggctggggaggcctcacaatcatggcagaaggtgaatgaggagcaaagtcgcgtctcacatggtggcaggcaagagagcttgtgtaggggaactcccctttataaaaacatcagatcttgtgagacttattcaccatcatgagaacagcacaggaaagatccatccgcgcgattcaattacctcccaccaggcccctcccacgacacgtggaaattatgggagctacaattcaagatgagaacacagagccaagtcatatctttttttttttccccttttttttttgagagggtgggtcttattatgttgcccagctggtctttagctcctgggctcatgtgatcctcttgcctcgtcctcccaaagtgctgggattataggtgggagccaccacacctggctgattttctcttatgggttggagtaaggtatggccaagacggttaagacgatccatgtcctgtgggatggcccatgtttcaccagcactcagatgccctggggctcggggcttatgggcagttttgctaattctcaaagttaagttttcagctgggtgaagaaggaagaaaggctgtttcgttgaactcagtgttgaggagagcagtgactgacagcagtggatgtgctctcatcctcctgcttttactgggagaggggctttgtgatggcaggtgtataacctctcaggttttatttcttttacattaagaaaaaagaaggtggggaggtggtgggtgacagagcaggtgatacgtgagagtcagtgaaaatgcactgctgggagctagagagcctgcgcagggtttttccgttactgtgtccgtgatgagttgaggaaaccgtgtctcagttctggaccatggccgagaggaagtgcatagtcttaagtctcttatctagtgatcatcaacacaaatggggcataccggctgcaaaacagagttgggtaccagtgaggcctagaccacctgggcgtttctcttccagagctacagttcctaggtgtaaaatagagctggtgatatacaccttgccaggttatttgaaaatgcaaagcacccagcacagtgcctgacacatgggaggcagtcacagacccatctgtgctcagttgctcatgacgaatgcccgttatgtctcaggcacggactagctgtgcagtaagagggagctctgagtcagacggagggtggatttgctctttgggcactggtgtagctctggatctgattgtccttcattatctaggttttggaaatgtgagtcattatgtaaagcttgaggtgttggtaggtgctaggtgaatcaagtgtggtggtggtgttttctatgcgtgtctcttaccaatagacttttgtttttgttttttgagatggcgtctcgctctgtcgcccaggctggagtgcagtggtgcgatctgggctcactgcaagttccgcctcccgggttcacgccgttctcctgcctcagcctcccaagtagctgggactacaggaacccaccaccatgtccggctaatttttgtattttcagtagagacggggtttcaccatgttagccagggtggtctcgatctgctgacctcgtgatccacccgcctcggcctcccaaagtgctgggattacaggcatgagccacggtgcctggcctttttttttttttttttttgagacagggctttctgagactccaggagtggtctatcatgccctgctaatttttttattttttgtttcttttagagatgagtgttatgttgcccaggctggtctggaactcctggtaccagtaaactttttaggaggtttccgttagcttttgaaaattttttacctgatctttaaaaatgaatgcagttgtgtagcaatttttaaagtgattgacagttttttcccaccctaccttttcttgattgaagcagttgattaaggattttgggagtggtcctattgtttcttgtatttttctgatttttgttttagtgatgacactgtgggaaatcatttgtcaggggcaaatttcaatcttctgtctgaatggatctgtctacttatctgtccatttatttgttcactactgtttacctgtctgtccaaccacctacctacccttccgtctggccatccatccatccatccatccatccattaaagttctttttgggggtgtgagtatccgtttaattgcactgcatatctacctacaagtcatacctcttagcaatcagcaggcaatgaatcgggccattccctggttgaaattcaacttgagatttctagagggagctactcaggttaaggatgcattatctaacaagaaaaatgaatctacagtaggtcgtattacagatgcagcacatgaaggcgcccacacattacttcttagcagctgagtgtgaggtgcatgcatgtgaggctcagaccccacggtcttagggcatccttcaacttttttttttgaagaggagtctcactctgtctcccagactggtcttgaacgccccccttgcctcaagtgatcttcctgtgtcagcctcctaaagtgctgggattataggcgtgagccaccgcgcccagctttcttcaacctgaaaactatttaaacattttattactctgtagctgttggcagtaccagattttatttacaactgaaggtagttttggatctaaaaccacagttttggtaatgttcaaaaaatggatcatttagtggttttaatgtcatgtatcaatcgttttcagagtatcttttatattgctcttctgtatatgttagcttactagttgattagtgtttctgtaacctgtcctgctttctaatctagccactaagtggttggatcaggatttatactcagctatgcctcctttaaaactgatgttttgtccctcatctccctaaagtttttaatggcatatatgtgtatatatgccatttatatatatatatatatataattatttttaagttcattttgcttttatatctccccgattttttgacattgtttgtttagagaaatttggccacagtttttagcactgggtgctgcaggatgagggctggacctgctgcttggagctgcagtcctcatcaggtacctgctcgttgtaccacctgcaccaccacccacatgctccccaattttttaaagttaattaaaccccgtactgaaggtaaaaatatgtatacataatttttattataatgctacttaaacatataaaacccaaggctaggcataaattccttatggttagaggaattttgtgcagctgtaaatcccaaacatacaaattcagtccaactacaaaggcagtaaatgaacacaattaatttaatgtgacaaaaggatgtagttttgctgacggtgtattgctaatgttgggtttcatgatacagtgtatttgtatttaagatttttgcttgctgtcacttaattcttttgattttgagagtgatagactctctcatttttcagtttactgagcagggttcccccactcctgccacctgcccctgcccgacggcgcagcacagtgacagcgacttttcttgtgtccatctcccactttgttcaaatggcagcaaataggaatttatgatctcatttccctcctttccttaggagaaaagtaatattctatatgcattattctgcaattttcttttttcatataacagaatattctcgaggtcttccctatgagtgcatggaaaactttgtgggccatcattggagttgccgtctttacagccgttgttttttctaacaatgtatactctaatctcattagaggtttgtcaccgataatccagattacgtcttctttggccctcaaacaaccctctgaagtaggtggcggtgggggtatcaggaagagaagaaactgagattcagagaggttaacggacgtgactgaggcgacagatggaagtgtgtggggacgtggcccaccctaggtctgtgtgcctagacaaaggctgggtgcattgctgccttctcagggccactgccgcctgctgagtccagcatgttcggggcactttccccccttcttggtgatggtgcgctgaggcccacccgcagtagctgaccgtgttggtcttgaccgtgttggtcttcagagtcctttggtgtttattgagtgcccttgggcagatgcgggaacaggtgcttctgcgcgtggttcagatggaaccgctatagtctgcagataactgagcacgaagctgagggtggtcagacgcctattagtcgcaaaatttgctgacccaatgtgagagtcgggaatgaacaatgccttttactgacctaggaggtgttacaatgacaagaagaagtcagagtgggcaggaggcactaggccaggagaggagagagttgggaggaggaagtggccatgctgcaggtgccctaacagatccagggaagcatggagagcacagcgcgacccgtgtggagagggcatcactagcctgcctcgggctgcagggggcggggagcacatgcggcgtgcagacctttccttaggtttgtgctgggtgctctgctctcaggcccacagaattctgcactgtgagcagcgcaggtcggaagaggcatttggaaatgacacgctctgtccaggaactgcagtaaacgttctagctgttaatattcttccttctggcagatggtgggtttcacactgagttaagtagcttcacgactgctagtggctggaagcttccagattagtagtttaagccagaaaacaatgttgatacgtcttgagatgtgtataaatcatttgatttggctgggcagggtggctcacacctgtaatcccagcattttgggaggctgaggtgggcagattatttgaagtcatagttcgagaccagcctggccaacatggtgaaaccccatctctactaaaaatagaaaaattagccgggcatgatggcgcacgcctgtaattccggctactcaggaggctgaggcatgagaatcgcttgaacccaggaggtggaggttgcagtgagctgagattgcactgctgcactccagcctgggcgacagagcgagattctgtctcaaaaaaaaaaaaaagtttaaggtgttggttgtgtgtgtgtgtgtgtgtgtgtgtgtgtgtgtgttaagagagccattgtaggctacatgcatgtggtaatagactttaaagggtaaatggaaaatggtagcttacaactgacatttagccaattgaaaagtgtaggccagggtgtagatagcacattcccctgcagtgcctgctgggtcctggaacgaggccttccagcaagtcggttctcacgtcaagggcatgtcctgagggttatggggccttggccatcagggagagaataaggttttctcattttcgacttcaactaatggtcatagagttgcttttcttttcatttattggtttactgtcctttcctcatcctcctctatctctgcgtcctcctttatctccagctcttctcctcctcctctttctcttcctccttctccttctccttccctccttgcatttgttcatctttaccacattcattatacacccagcaaaatgtgaaacctttcatttcctgttcctggtacatgcagcaaaagcttgattatacaacattatgatgatatagacagaaaacacgtctgaattgtgttcatggaatatgtagcattcccatggttgtcaattactgtagctcattacggtgagcaagtatgtcttgttagtaagaaggttcagggagttgagatgacggggctgagatgctgcctgctgtctccatggtatgggcaggtaatggtgcagggggcgtttatgaactggtgtggaggtgcctaatagggaccctgtgcttgaggaaagggcagaaggctgatggcctcgtggctgtactcccgggtgcttcttgctgggcggctctcactgagtgggagtgaatgggaagggaaacttcctgatgtgatccttcagctgaacctagggatgatctccacgacagtagaccctgaggagcaccccgtgccacccaccaggagaagcccagaggaagtgataccctccctgacttgttagagtgcttctcttgaaggaaagaaaacccagaaagttctttttgacttctgtcgtactgaaggtatcatcatcttagacaccaatttagcatgaagggaagataatgtgtcagacacttgaatattgttgcacgtctgcttttccaactgaattttcgagtgcagatatatgtgcagtctgtttaatataatgggttttcgatcttgtcctttcttggaaagtaaaatgctttttattacctggaaactaatttcaagcaatagattgcatttttcctgggagtcttgtggtcagttttgtttttccaatgcagattgcctccaaatctttattttgaaaacttttcacacaattggaagacctgaaagaatggtaccatgaacacctcacactcaccactttgacacaaggcttgtttgcattttgtcgtatttgctctttctgtcacacttttgtttgtttttgaatcatttgaaagtaagtagcacatgttattattattattattattatttgagatggagtcgcactttgttgcccacgctagagtgccgtgatgcgatctttgctcaccgaaacctctgcttcctgagttcaagtgattctcctgcctcagcctcctgagtagctgggattataggcacgcaccaccacacccaactaattttttatttgtacttctagtagagagggggtttcaccatgttggccaggctggtcttgaactcctgacctaaagtgatttgcccaactcggcttcccaaagtgttggggttacaggcgtgagcaggagtgagccaccatgcctggctagtgattttcttcctgaatactcctgcacacatctcataagaattcaaacatcattcacccgtctaaccataataccaatatcactcctaagaaaattgaccatacttccacaatattatctaaatagttcgtctatattgaaatttcttcagctgtttcaataacatcttttatagctgtttttttttttttaaaaaaaacaaaatctactcattatgtttgtttctttagtcttttctaaatgcagaggtttttccccccctgtaaatgacacagacttcttgtggaagggtcctgctgcttgtgttggagaatgtcccacttaggttttgctgagtgtttcctcatggcatcatttcacttgtcttttcattccctgcatttcctgcaaactggaagttcaatctagaggtttgattgtatccacattaagtctttttggcaagaacgcttcataagtgttgttgatgacttcacattgcattacaccaggaagtgatcagtctttaacttagaagatttgctctcactctaaaataggatagttttaaaaataggcatcttttttaagggaagtgttctcactctttcacccaggctagagtacaatggtatcatcatagctcactgtaacctctaactcttgggctcgagtgatcttcacaccttaccctcccacgtagctgggactacaggtgtgcaccactatgcctggctaattaaaaaatttttttgtagagacagggtcttgctgtgttgcccaggctggtcttgaacttttgagctcaacagatcctcccacctagacctcccaaagtgctaggattgcaggtgtgagccactgttgggcctaatatatgaatcttaatgtttactctgtcttcacacataactgattgtctagttattaaattctgtgttgtaaatctgacttgcttagcttccagtgtcgaattatctgaagccattctgattttcagcctttgctttgtggctcatttgttctctgaagcctgtgtcttatgtacaaagaaaggtgtaaatactcttcttcgacttttaattgaaactgatttggaaatcatttgtcacaacctgggcaacatagcgagatcttgtctctacaaaaaatacaaaaaaactagcttggtgtggtggcacccacttgtggtcctagctacttgggaggctgaggtgggggcatcacctgagcccaggaggttgaggctgcagtgaaccgtgatcacgccactgcactccagcctgggaggcagaatgagactttgtctcaaaaacaaacaaacaaaacttttgtcaaagatgtaaggccataatgtggatggaaattttaaggggaaagtaaaatatataagcgtgtatgtatagttataaaaagaacctaaagcatctcaaagtccatagtccgtcagcatcagcgtctgtccacagagccagggtccccccttggatgcatctcctgtaagatgaaggcccccctgccctggtgtgatgtgtggccttcagtgatcatcatcatcctgtccgagagtcctgctggctctgcttggagaacctggccactttcctgcctctgctcctggcagcctccgtggcccgtcacttcttgtttgcctgtgaattctctctccagactcgagtgacactttgccttgcaaagctttccccagtgctgtcagacagggttagttctaagtctttcctgggagatctgtggcactctgggcatttctggaaggaaacttatgtgtgtctcttgtccctggaagggacagggcacatcttgttcatcagggcaccgcagccccaggacctgactctgatgccacaagcatttaatgaagacgttcaaagtgaacattcagaatctctgtctcttcatacttcttttcttgtgcttatatttagtatgtagtaacattcatatatggacactttcaagaactaacaggacacaggtgctgtctatggttgaatgacgctgtgttggactcgggctgggctgtgtgttgtgtggacacaggtgctctctatggttgaatgaagtggtgttggactcgggctgggccgcgtgttgtgtggacacaggtgctctctgttgttgaatgaagtggtgttggactcgggctgggccgcgtgttgtgtggacacaggtgctctctatggttgaatgaagtggtgttggactcgggctgggccacgtgttgtgtggacacaggtgctctctgttgttgaatgaagcggtgttgagactcgggctgggccgcgtgttctggataagtggctgtggagcacgatgaagcgtctatcgcagcatcatctctgcacccagatgtggccgtgctgagtggattcctgccccagatcttgggaagaaggttggctttcctcctggtgttggtggaaggcctccccggcgacactgctgcactccactggggcctttcattgtcctgtcccttcctgacaaggaaatggctggacactctcttcatgtcagcacccctaggtgctgggggctcaaagataagccaggcctggaagacccacccagagccaggggagcccacccccaatacacatactcaccaagccacatgctgcggttgggggtcccagaggtgtgctcaggccagcctgtggggacagcaaagtggcctccccgagaagggggcctgtcctcagtgtttcagaggcctcaccttgtctcatgcttgaaatatttcctgaagaatgccatttttgaaatttattttctaaagaaaaaaaatccaaatattgaaaggctctgcttgaatttttgtcaacaattactatatcaagaaaatatttctgatttaggtggctccttcagaatatctgattcctgtgttggcttctgcgttgcctttgcaggcctgtgtctgtaggtgaggttttcctgttcagatggagctctgtggtggtaaatgtggccttccttgttttatgttacgtgtttctctcaacttcatgagatcagaccagatagagaatgttaaagaaaaaatatttcgggcaattagaattgcaagaatgtcaagaagaaatatgtgtagtgaatagcaggctgtagaaaccatctcactgctcagatcttaaaatctgtagccaagagaggctttgaagcacccagggaagatgcatgtgccactctgcattttgtaaaattctgaaccatggactttattgtagtgctcgctttgccgacagctgctttagtcgtcgataatccccaaggatacttgcgtgtgctgttgccttcgtcaccaggacttggaggaaactgcagtgttgctatttgttatttcacgttgatatttccttccacctttggccttgtcctgcggtaattcctcatttaggattcctttgaatagttgggtcatggggagagttctgacgttattttactaaggtgaggtttgctaagccatcattcttacgtagatggcagaaaaagccattcggagaaaatatctgagtctgttcccgccaggttaaatagaaaggggatttgccaaggatctccagaagacccgagagccggtccctgacgttatggtaggcttcaagggggcttctgtagctgctgagcaactgagacagtggaggagtcctagaagacctgccaccgcctcctgaagagccaggtgcctctgccacacagctcacagggtgctcacctccctgtggaacgggggcctcgagtctcagggtctagaattggatcttgtaggtgcatctgatcataggaacccaggtcacatgctggccccttagctgcaggagtcaggacacagtctttttttccccaccttagtaagctatgaaccgtagcataagaaattgtcaaatatatggaaggtgttaagaagattatggggaactacagatggcagatgtctgccgtggttccccatggggcatcttaatggacggcttattactaggttttcagctgtgcaagacctttgattcacccatgcctttcatctctgatacccacttagcagcacatgctgttacctattctctttgaaattgagatttctttcttccttgtcccattccactcttgccacacctagctcaggccttcttattccaccgtgacagcttcctggctaatttcccttcctccattctttttcttcccaagtaaatgttagcccttgtcattaatgttagacgtcatcttcctgaaaatatccatttagccaggtttatgccgtggcagctgcagtggggcccggaggcctttcttccaggcctctgttattggaatccacctcccgcgtctatttggagctatggggcctttggaacggcttcatgagatgcgttggcccaagcagaaggctggtacagaagcagaacaaagctctgagcattctgagagttttctgttgagaaatgccatgggcttatgtcttcagcctgcctgggagccctgcatatttttacttgccttggggttgatttgatgaagcctgtaccatgggtaacatattgctggataatgaagagtggaaggaaaattagccctgaatgaatgactcagtcccatgataatgtggctaattttaatttgcatcaggaatagtaaagctgtggcccagtgtgttatcaaataaatctctaaacagccttgaaatcaatccatttattgaaaattgaaaatctttttttttttttttttttttgagacggagtctcactctgttgcccaggctggagtgcagtggcacgatctcagcccactgcaacctctgcctcccaggttcaagcaattctgcctcagtctcccgagtagctgggattatgggtgcacaccaccacgcctggctaatttttgtgtttttagtagagatggggtttcaccatattcgccaggctggtctcgaactcctgacctcgtgatctgcctgcttcggcctcccgacgtgcagggattataggcatgagccaccgcacccggcctgaaagttgaaaatcttgttccatgaaataaattttagaaaattagccagacatggtggcgcatgcctgtagtctgagctactcgggaggttgagatgggaggatccgtttgagccctattgaagcaataggcttcactttgtatcttgaactgggaaggagtggagaaaaaaaaaatattagagccctttgctatacttactttacgaagaccaattatttgttggtttttaaggaccagagttcccaggagtaagtgaaacacgactcgatctcttaagtgtgcccaatactgccagcacaacattcctcacaccggtccagcttgctagttaccttggatactcgcccaagcttcagctgactgcgcaggttattttctatatcttcagggtataaaaacagttgtatagacatacatgcacaaccatgaaaaaaatttttgactattgtggtaaagtcatttttatccccacttctgcccccccatgcttatagaaataacatgtttatggtagatggaaagtgcatacacagaagggccaggtacaaagaagaaaagaagaatcatccacgttcctctgaagaggtcagaatcactcatgacatcttgtgttttcatttggtacgaccttatatttggaatcacagttgtgggtacagttttgtaccctcctcttttcagttatgtttgagcatgtcctgtgccatttaatattctttgagaacatattttttaaacagctctactgagatacaattcacataccccagagttcacccatttaccaacagagttcaccaacagttgcaatctgaaagtatgtttttgtaaaggacatatactattttatcatgtaacactgtttaatatacgccatttaattatgcccttcaacgtggaattttaggcttccataggatacagtttatcgtatttagattttatgctgttgaatgacttggaattaatttgtaagtgtagagaaaaatgaatcctagggctcagagcactgcagcagatcacgtatttttgctctgtgacaaagtatttttattttcactttttctttttttgttaatttcaccccataaggtgtttcgggtagaggcaaatcccacaagtatccttggggattatcgacgactaaagaacagcaaagaaatggttcctagctcctcacgcagtccttggtgggcggtgggctgactggctgcgcacgctaggcctcaaggtagaagcggttcatttagagacccccaggcatagtcgcatggcttcacacacccgcaccagggctgaccatttgtttttggaggaaccacaaaaggattcagtatggaattccttaagaagggagtttctttagtttgcttaaaatagttacaactttttttttttaagacggggtcttgctctgtcacccagggtggagtgcagtggtgtgatctcggctcactgtaacctccgcctcccgggttcaagcagttctcccacctcagcctcccgagtagctgggaccataagtgcgtgccaccacagccggctaatttatttatttttatattttgtagagacagggtttcaccacgttggccagagtgatctcaaactcctgacctcaggtgatccgccaggcttggcctcccaaagtgctgggatgacaggcgtgagccaccatgcctggccaaaacagttgcagtttctataataaactttttttcccccagaataaaactagcacctttaaagtgagctataacgattccttttatgaaacttattttgtatgcagttcttattttgactttcagaaatctaaatttctcaagggtctgtgatgttggaactaaactcataccaagtcccttgtgcagtttgcgtggtgcaggaaggggtgagccaagtgaggactgtagcactcacgtgtgcgaaggtcgccgtgggcgaggcctcctcatccctgaggccgaaattttcctcttctcgtttccttttgatcaggatgttctacaggggtggaggcagattttaaaagcagtgatacatagacagaatttggcctaaaaaaagagtagtacttaaatctaaatgaggcctctggctcaaggtaacgagctgagctcatagattcaagcacctctcccctcattcccaattcccattgaaatgaacaaaggaatataaaaatagagagtctcccaagctaacacagttgctgctggtgatgatgatcttgttttggactgcaggttttggttgcagaaattcagttggatgtgcttcctgcgggtttggtgctcactttgtagcagtgcttggggatggaagtgaggggcaaactggcttttccttctcttggacaacttggttacccgcctccccttccctgcgaggtatatctactctctttgctatgtgttctagtttctgactctctttataaattatgcatttgtgtagcttcggctttgctccgagtttctgcttgatgctgtgaatcctaatgagcgctcccgggaattgggtggctctgccttcagacaaaccaggggatagtgaatgttgtgacctgtgtggccagccccagtcttgctttgtgtttattttccacaactctcagttgttgatgttgggaggataagtgtgagccacactctcagtgtgggggacagaaggcagtgattgggctgctgaacatgtttaatttcttcattctgcatggtgacttaggtgtcactgcacgtcagcctgtgaatttatacccaagcttgtttgtgccacctgatcacctgtatctttttaaatatatatgattttatccaatcagttatgaaggaagactctagtaaggaaatcccttgtgatttgctttgaattctttgggaggtgacaggcgttaataggtttttcacctgtgaggtgacatgctctgagcttacaggccttcgagtggaggtgatctggtctgcaggccctgtgtgcaattctgaaacccagaagctctgaacgctggattatttccacagctcatttggtggcaacgcttggcctgagctggggtgagactggacactcttgattgattccatggagagtggaaatgttaacgtggtgagtgttgggtgctgctccaaaccctcctgggtgtgttaaccctcctgggtgtgttatgtgagatggggcagagggatcacattatcctttcaccaagctgaacactgtggaatttcaaaaccaagctggcaccaaaggagcatcaagaacactgcccaggctgttataataacatcaggaccccactgcttgacggcccccagcctctcccacctggaatccaaagtgccgtggagatctttgagccggggcacaggatccttaggcgtgtgctccagcctttagtgggtgcctccaggatggctgggaagaccagtcatgagtcagaacttcagaatctgaaaaatccttagcacctgagaggtcatctgtctccaccccctcactttaaggatgaggaaactgttcaggagggattgaaatttaccgtcatgtccaaggccatgcattgttagtgagcatttatagttttatagtttctcaaaatgatactcttttcaaattcaaaattaacctatggggatataacgatgtcatcttaaattacattgcattggaggaaaatgtcttaaagtcaaaaaacttatgtaatattatgcagtttttggcacattaaatttgatagcccttacattttaaacattctgtaactgttattaaaaaacattaatcaagagtttttgaaacgaggttgccatagaaatgaaaatacaatgccaaaaagacattttaggtatagctaagaatttaaaaacttactaaatttgaggccaggtgtggtggctcacacctataatcccagcactttgggaggcggatgctgccagatcacccgaggtcaggagttcaagaccagcctggccaacatggcgaaaccccatctctactaaaaatacaaaaagttagctgggcatgctggtaggcgcctgtaatcccagctacttgggaggctgaggcaggagaatcgctagaacccaggaggtggaggttgcggtgagccgagatcgtgccactgcacgtgatcgtggtcaacagagcaagagtctgtttcaaaaaacaaaacaaaaaacttaccaaatttgaaattaggctcacagtgttaaaatctgcagaggagcaagacgtattttttttggcttaaggatatgtgatagtactgtcttttgcccagttttggagttaaattggtagctagatattagagctaacacgttgttctagttcatgtgtgagtgtattcgcgaggtgcttttcttgttttctttaaaagtataatgcaggatgtagggttaggtgtgtattgtataaacaagatgaatgaaattaatttatttcttgtcttcattcttgtctttgtatagtgtagctactttcacacattccagctgagggccatgccttcctattgctggcctgtaaagaagtcagaaatggtctctctaggtagcatttggtgagtcaggaagaccacacttgctgacaggcacagtgaggtgaggcccctagccatcccatgggactaaaggatgattcttgggcttctattaatacttttgtgtaagggactcagagatcttcagagatacttttataattaactagagctactcatttgactgagaatgttaaattttaaaaatttaattagctgcatttgtagaggtggagggaatatgacttgtctaaaatgacagccgaggtagcagaaataggaatcagtcagaggtgttgggaatgccgtatcaccgccctgtgtcggcctctgccgcctccccagccccgagacgcagaggaggaagcagacccagcagccgcagagcctcttcacccagcgagcttgccctagtcctggctgccccacttgctcgctccctggacttgcagccgccccttactccctggattcctcgctgggaggggaacgccaccacctagttcatgtccctgtggtgaaggatgaagtggactgtgcgtctacactgcacggctcagggaataagcactagcacagggagtcaccattgatccgaagtgctgggactgagtcccaaacctggctgtgaatttcccgggggcaagaaagaacagggttgtgtgggaagttactgagcatacatcagcccagaaaaacagctctgcccaccttttcctggggcgcacggagcatgtggataaacggggagaaagcactgccagacaagccccagggcagcggcggtggcacttggccacgggagcagcaggtgggtgtctcagattcggcccgttaatgctgtttcttccacgggcttttgctagaggagcctaacatcagtttaaggcctattctctttgcagattagggacaagataagaagccagtggggaaccagttaagctgtggggaagcacaaggtctattagaaggcttcccttcccacagagggaccctgcagatgactgtaggcaaagccagcctcttcctttaggaagcaacttggaacttgcgccagggtttgaatcaatccctctccatattacagggcatgaaaggaacacccttgatttaaaagtgttgtgaggcaggtgttaacagctgttcaccatggccacaggaagaccacagaaacgtttccaggaaatgtctagttttaagcagtttatcctcaaaggctgagtttgctatacaataattgggatttgggattatggatactgatcacttaaatattggaggatgactaattaaatacagtgacttttgttgttctgatttttagtgctttctcctgataatagatgaaggggccatttgtctcttacgcttcataatggaggcttctgttacatgtctgtgggaagacattcttctcctagtatatccacggaggcagagatgcagttcctttagaaagtgatattattggctgggtgcagtggcgcatgcctgtaatcccagcactttgggaggccctgggctggtggatcgcttgaactcaggagttggagaccatcctgggcaacatgacaaacctcatctctaccaaaaatacaaataaaattagctgggtgtggtggcacaccctgtggtcccagctactctggaggctgaggtgggaggatcgcttgagcccaggaggtggaggttgcagtgagccaagattatgtcgctgcactccggcatgggtgacagagtgagaccccacctcaaaaatgaaacaaaacaaaaaaagaaagtgatataattaataaatttttttaactgttaagagaggaggcactaaaatgcttcctttttcctatacaactttaaattctgttttgaatagagaatcttatctcgatgtgataaagattgtacttaaaatcagtcgccagcatcattctgaacaatgaaacatttatgtctcatgaaaatcaactgcaaagatctccactgtcatcattttgttattattagtgttattttagaagttctggtcaatacgctaagatctaaaaccgaaacaggaggaatgatctattggaaagaatgagacagacttattattcttagataatatagctgtatactttcaaaacctgaaaagaatcaccaaaaagcaattacatttaactaagaatttagtaaaggaactaaccatttttcttatatatcagcaattatcaataagaaactgttatggggaaatacatatatttccctgaaacactcatgaaatatctggaaatcttaaaattaaaaattaaaaatacttttattggtgataattttttacattcatataatcaaatcagagtaattgagatacctatcaccttaaatatttatcgttttcttttttctttttattttttttgagatggagtcttgctctattgcccaggttggagtgcagtggtaccgtctcggctcactgcaaactctgcctcccaggttcaagtgattctcctgtctcagcctccggagtagctaggattacaggtgcacaccaccacgcctggctaatttttatatttttagtagagacgaggtttcaccatgttggccaggctgatcttgaactcctgatgtcaggtgatctgcccgccttggcctcccaaagtgctgggattacaggggtgagccaccgtgcccagcctatcttttctttatgctaggaacattcgaattattttctttaggtatttaaaaaatgatttattcatttatttatttttagagatggggtcttgctgtgttgcctaggccggagtgcagtggctgttggcaggcacagtcatttcacactgtaccctcaaactcctgggctcaagtggtgctcctgcctcagcctcctgagtagctgggaccgcaggtgtgcaccaccacacacttctagctgcttgaaatgtactctcaattaaattaatgttaaccgtactgtcaattaaattaatgttaactgtcatcgctccactgatttatggaacaccaggtcttaggaataatcctaataagaaaggcacaggacttactcgtgaagaaaactataaaaatgttactgagaacagttaaaggtacatttgaataaatggagaaccatattatgttctgtatagaaaaatagaatattatgaggatgttacttcttaacgttaagttaaaattaaacttcattgcaattttagttcagtgcaattttaataaaaatcccaatgggattaaaagattgaagaactgattaatttgaaaaagataagtgaatataaatagctaagtaaaattaaaatttgagggtgaaaaatgacccttccaagtattatgaaatataaagataaattagttaaattaatgtagtactagtagaagtattggttgataggttaatgggatgaatttgattacccagaaatagaattttgtctctgtgagaattaatacatatatctgtgcacacctgtgagtttggggcagattatttaacagggattgacacaactggctagttttatgagaaaaaattaatctttatcttgtatcatataccagaataacatccagacggcttaaagggtcaatgtaaaacagaaacactgtaccaaaatacatgtcttccctcactcagcaggtagttagcacctggtccaggccagggttttgttcaaatgagtggacttgagtctctagcccactgaggagcatccatgggccggagctctgccgggaggaaaggacaggtgtgatcgcagcgttccccagctggctccaccccgatggggagtgtggaaggtgtgttgaggggtatccagagaaggcctccccaagaaattgatctttaaactgagatctgaagagagagtcagagccggccaggtgacccgggggaggggaactcccagcagagggaactgtggatttgagggccgagaggtgagtgtggccaggccgcagtgtaagtacgaggaatgagtagtgagtagatggtccacggagagtgaacaacgcaggcagtgaaggcactctaggagaaccaggcagcatcactgatgtgaacgaatgtaaactaaatcaatacgacagcttttctcattaaatgattgatggttttaaataacaagaattttacatctggtttaatatctggtgggagtgtaaatttgtgtaattttttttgcaaaggaatttggcagaatgtattgagtgcgttaaaatgtttatatcttttgatcaaataattccatttctggagatttatcataaggaagcctgagaatagcccttcctgccacgtccctctcaccacctgtcccctttgctgtgaaaccctgccttcaaagaagggcgttactcctgcactagggctggggtagccaggtgacaggcggaggactggctggagggcaggtgggtagggaaggggctcaatgttctgggggacattttaaaagctggaaaaacacataaacgagttccatattgaaatatttatttatttttttctgttgtgttttcagatgaagacagtcagtgttgccttagttttgtgcctgaatgttggtgtggaccctcccgatgtggtgaagaccacgccctgtgcacgcttggaatgctggatcggtgagtatgcctccctcacgcgctgccacaaaggccgtctggccggctctggcctgggcggggctcgccaagcctgtggtctggtccaggggcccgtctccagctgtgcaaatctgaggggtttttctttctggagtcacatcacctttgagtaatttccgatgcgctcacctgtgattggtagtggagagagtgtttccagaaaaatcaatacagtgatgattattggcttatataattttctactttatttttttatttattattattatttttttgagacagagtcttcctctgtcaccaggctggagtgcagtggcatgatcttggctcacagtaacctctgcctcctgggttcaagccattctcatggctcagcctccttagtagctgggactacaggcacccgccaacacacccagctaattgttgtatttttagtagagatggggtttcaccatgttcgccaggatggtctcgatctcctgacctcgtgatccgcccacctcagcctcccaaagtactgggattacaggccaattttctactttattacacgcccggccaattttctactttatatttgttctgtctggcacacatagtatctatgtacacttaaaaaaaaaatggaatgactgatacctgcatggaaatgtagaagaggtaaatggaaccacttccagcaaagcatcacataatggatcatggcccataataataatggccatcatttgctgaatgcttgtagtgtgtcagacgccactggaagcactttacaatgctcacaacaaccttgtgtggtagggtttttgctaatctccatttgagagctgaggaacatgagacatagagattagtaatttgctcacggttgtcctgtagagctggaatttgaacctatgcagttcaagtccagagactgttttttttttttttttaattgtggtaaaacatagacaacacaaaataccattctaggaattattattattattattattattattattattatttttcattctaggaattattaagtgtacaattgaacgacatgaaataattcataatgttgtgcaagcatcctcactgtccatctctagaaccttttcaccatcccaaacagaaactctgtctccattacacaactcctcattcctgccttcccctagcccctagtaaccgccattccaccatctgtctctatgaatttgtcattctagggacctcatatcagtagactgatatttgtccctttgtttctgccttctttcacttagcataatgcccccaaagttcatccatgtcgtagcatgtgtcagaatttcattctcctgccgcagcctcgcaataactggacttataggcacctgccaccacgcccaggcaatttttgtatttttagtagagatggggtttcaccattttggccaggctggtctcaaactcctgaccttaggtgatccacccgccttggcctcccaaagtgctgggattacaggcgtgagacaccatgcccggccaagatacaatttatatacagtaaagttcacattttttagctgtacatttctttaagttttgacaaatatgtacagccatgtaacaaatgccataatcaatgtatagaatatttctgtcacaccaaggaagttcccttgggtccctttgtaatcgatcccctctcatttctctggcctctggaaaccattgatctgattttttccttttacagaatgtcatttaagtggcgacatatagtttgtagtttttgtatcttgcttctttcctttagcagaatttatttgtgattcatctgtgtagctacgtgcattagtagtttttttcctttattccatttttatggctccctcacaatttgtttatccatttactagttgacagacatttgggttgtttctagtttttggcaattatgaataaaattgctataagcacttgatctttgtgtggacatattttctctggttaatatttaggactgtgattattagctcatatgttaagcgtatgtttaaattttttttttttttttttgagatggagttttgctcttgttgcccaggctgggagtgcaatggcacgatcttggctcaccacaacctctgcctcccgggttcaagcgattctcctgcctcagcctcccgagtagctgggattacaagcatgcgcctccacgcctggctaattttgtatttttaatagagacaggatttctccatgttggtcaggctagtctcgaactcccgacctcaggtgatccacccacctcagcctcccaaagtgctgggattacaggcatgagccaccgtgcctggccaagtgtatgtttaattctttaaggaactgctgaactgtcggttttttaaagatctttaaaaataatgaatgtcttttatatttaccttcatatttattgttttgaggaccattcatttctttccgcagttccaagtttctatctggtatcataatcattctgcctgaagaacttactctaacatatcttgcagtgctggtctgtaggcattaaattttcctagatttctgtttggaaaattcttcattttgtctttgtggttgaaaggtattttttcggggtatgtaattttctgttgactcttttagcactgtcttttaaaacagtcacctgttgtgttctggctagcagtttctgagaagtctgctgtaattctttgtttctctgtatattttgcttcatttttctctggcaatcttcaagatgttccctttatattctcagtagctttatctataacctattagttttttgtttgtttgttttggaatttattctccccacccttttttttttcttttagagatgggtgtctctcaatgttgcccaggctgggctatacttgaacatctgggctctagtggtcctcttgcctcagcctcctgagtagctgggactatggatgcccagtactgcacctgtgaaatttattctttttgggtttctgtgagcttcttggatgtgtagtttgatgtcttcatttttgaaaagttcccattatcttttcaaatatttattgtttgttttctctctcttctgggactcagctctctatgtattgtgctgttagacattgtaccgcagctcttccatgtgtctctctcttctgggactcagctgtctatgtattctgctgttggacattgtaccgcagctcttctgtgtgtctctctcttctgggactcagctctctatgtattgtgctgttggacattgtaccgcagctcttttgtgtgtctctatcttctgggactcagctctctatgtattgtgctgttggacattgtaccgcagctcttccgtgtgtctctgtcttctgggactcagctgtctatgtattgcgctgtcggacatagtaccacagctcttccatgtgtctctgtcttctgggactcagctctctatgtattgtgctgttggacattgtaccgcggctcttccgtgtgtctctctctcctgggactcagctctctatgtattgtgtcgttggacattgtactgcagctcttccgtgtgtttctctcttctgggactcagctctctatgtattgcactgttggacattgtaccgcagctcttctgtgtgtctctctcttctgggactcagctctctatgtattgcgctgttggacattgtaccacaactcttctgtgtgtctctctcttctgggactcagctctctatgtattgtgttgttggacattgtactgcagctcttccatgtgtttctctcttctgggactcagctctctatgtattgcgttgttggacattgtaccgcagctcttccgtgtgtctctctctcctgggactcagctctctatgtattgtgttgttggacattgtaccgcagctcttccatgtgtctctctcttctgggactcagctgtctatgtattgtgttgttggacattgtaccgcagctcttccattgtgtctctctcttctgggactcagctctctatgttttgtgctgttggacattgtaccacagctcttccgtgtgtctgtctcttctgggactcagctctctatgtattgcgctgttggacattgtactgcagctcctccgtttgttctctcccatgtcacaatgagcttttgttagtctgctgataaaccagccaaggaaattctttttctctgatattgggttttttatttctagcatttccattgactattttagtttccatctctaggggaaatgcatattgcctgcctttccttctagagcctctgctgtgttcatcatagttaccttagagtccttgatctatagttcagaaaacagggtcagccctgagtctgagtctcctaattcctttatcatctcttgactgtaatttgcttttccttgctttttttgtgctttataaattttaattgcatgctggacattgtgtgtagaagaacaatagcgaatgaggtaagttgcatagtctatagtttagtaagtagttaactggggttagaatttgttgttgtaatggttatacccactgcaacagcactcttagttcttagagtgattagttggtgcttgtgtcagtcaaggttctccagagaaacaggggcagtagatgtgtgcctgcatgtgtgtataagtatgtatgtatgtatgcatgcatgtcttgtgatcttgaggcagaaatttcttctttctcaggaaaacctcagtttggctgttaaggccttcaactcattggatgaggcccccatattaccaaagaaaatctcctttactttaagttagctgattgtggatgtcaccacatgtatagagtactttcactgtggcacctgggtttgtgtttgattgaattgctgagtgctacggcctggcccagtggacacataaagctgaccagcacagtcctcgtgcattagggtgggtacaggcaggccagggggttttcccagggctcctgctccacccctagcctgagctgtgcctgcccacgtgcctcactgagtggtccctggctttgcctgtctcctggcacaggatttccattgctagttactcagcgccaggctgtggagtggtgggagttctctgtggtcctggtctctctttagtcttaggcaggccctgggcatctgggccttgggcgtagtgcggttgcagtgttttcacctgtcccccagtgatggcaaacgtctgcctcgattcagtgtagaattctgtgcccagggcgtgttctgctcctatcccaggagtaggctgttttgcaccttccctcaccccatcctccatgctcttcacctgtgtcttgggacagtgtgttctatgcccatggtgagcaaggtaggttttgtctgtacctcctcccactccccaggtacaggaatgtgtgcctgttcttgtggactgagggtctcctgctttgcttcctaggggaggaggtctctgggggcaggtggacttcaagcctctccacactctgtgctgcctccagcagatgcttctcatgaagtgggggtgcagtgggggtgcatgcaggagagtgtgagtgccccttgtgcctggaccccctgtgtttccacacggatatgcaagcgcacactggggcctcgaggacacattaccatcttagctggtttcttgtgcagacctgcgctcttcaaagatgggctgtgcatgtgcccgggctttctcggagaggacgggcctgtgggattcggtttgtctgccctgcggtctcagctcccttatgagctcaagaaaagtgatgatgtcagtgattattcagctttctcatgttgataggattggagccactctttccccccagctttctacatcctaagcaaaagcagaagttccctttattgctttaacaaaaactacaaattattctcagcctgggcagcatagtaagagaccatgtctctacaacaaatcagaaaattaggagggcagggtggctgattttgagatgacaggcatgcctgtagtcccagctactctggaggctgcagcaggaggattgcttgagcttgggaggtcgaggctgcaatgagctatgattgtgccagtgcattccagcctgggcaacagagtgagaccctgtctcaaaaaaccccaaattcttctcatctaaatctcatctaatctgaattggaaataaatgttgtttttcctgcattatttggctgtcacactatgtgagggtgttttaggatgacagttccctcaccccttccaggctgcttgtcccccacaccccatgatggagcagctgtgttttgtggctgatttcttcagatgctctcttggctcactgctggctcccggtgactgtgctggttgaaattgacttcttattagccaccatggactctttccacttcatccgtccctcgtcacagctgaatgtaatcagttattttctcttcctctacagcaatgcttatgttaggcttttcgaacaagccttcctcatgcggatccctgtgtgtgctccggggacgggacgcgcaggcccttcggggttgtgtaggtgtcatctgaggatccagttgctcttccctgcctgaggagcctgagcttttatcagagctcaccgccctctcccacacagtctctttgatcagtatttacacaatgttaatgagaatggaaaaactccatgcttctttcttggtgtgaaagatccagcaaatgagatttctaaaacttgagttttaaaagttttcctgcagtttaggaatatcgtctactttctaataatttcaagtgaattttgagtttaggagggcatgtgctttttctaagttggaaaaattttatttggcctttattaaaaaatgggtaggttcctggtcctggtgatggtggttttaacaatatggcataagagaataagaagcctagtgatttgaatcagcacatttgcaggagtgtgtagcagcccacttttattttttagtttatttacttgaaaatttttatttttgtgagataagaccttactctgttgcccaggctggagtgcagtggcgtgatcatagctcactgcagcctcaaactcctgggctcaagccatcctcctccctcagcttcctcagtagctgggactgtagatgtgcatcccccacgcttttaaaattttttatggagacagggtctcactttgttgctcaggctggtctcgaactcctgggctcaagtgatcctcccacctcggcctcttaaagtgttgaaatgaccggcatgagctaccacactaggcccatttttcattttgaaaaaaaagttccaaaagttgcaagtatagtactaagctgtttcctttctgattctctgagagaaggcggctgacatggtgcttcagcacctctgaattccttagtgtgtaattcctgccagccgggagtttctctttccagatgacaacgcagtcaccaaaatcaaggagcattcgcgtggacgtgtgactgccacgtaagcgtccgctgcatgcaggtttgccagtgtcccaggaatgtcctttgtagcgccaggatcctgctcagccatgcgccatcctaacttcctctcactcagtctgaagcagttccacaggcattccgtgaccctcctcaccctggcgcttgaaggtggcagtctctttgttttgtagaatgtctccggtgtctcctaatgattccgtttaggtcatgcttcgctggcaggagcatcacgcagagctgcctgcttcacgcgggctgcaccaggtgatgcggggctgtgatctatccattactggtcatgcagatcttctcacctgattcagctggcgcctgctggacctcatgtgaaattcccctttgtagttgataggtattttcgggaagaagtgctttgagattgtgcaaatattcctttcctcgtgactttcaatttcttcattttgaactcatggcctccattttcattcagtggatttagaatccagtgttatcctttggtgccgagcttgtctccctctggttgttgggaacccattgggccggcttctttggcttctgtcttgtttgcatcattcgtggagcatgtgcttactttgtctcatctagtctttttcccagcctcattcctcttagtggaatgtggtgttagaaactgagatctgggtgccaggtgttctctttgaactggcgtgctattgctcccaggacctctctcgctggacagagcaaggaaatgcatgtgtgtgcatactatgtatgtgtgcatactgtgtgtgtgcatattgtgtgcgtgtgtgcatactgtgtgtgtgtgtgcatactgtgtgcgtgtgcgtactgtgtgtgtgtgcatactgtgtgtgtgcgcatactgtgtgtgcatactgtgtgtgcatactgtgtgcgtgtgtgtactgtgtgtgcgtgcatactgtatgcgtgcataccgtgtgtgtgcgtactgtgtgtgtgcgtactgtgtgtgtgcgtactgtgcgtgtgcgtactatgtgcgtgtgcgtactgtgtgcatgtgcgtactgtgtgtgcatactgtgtgtgtgcatactgtgtgcgtgtgcataccgtgtgtgtgtgcataccgtgtgtgtgtgcatactgtgtgcatactttgtgtgtgcatagtgtgtgcgtgtgcatactgtgtgtgcatactgtgtgtgtgcatactgtgtgtgtgtgcgtactgtgtgcatgtgcgtactgtgtgtgtgcatactgtgtgtgtgcatactgtgtgtgtgtgcgtactgtgtgtgtgcgtactgtgtgtgtactgtgtgcgtgtgcgtactgtgtgtgtgcatactgtatgtgcgtactgtgtgtgtgcgtactgtgtgtgcgtactgtgtgcgtgtgcgtactgtgtgtgtgcgtactgtgtgtgtgcgtactgtgtgtgtgcatactgtgtgtgtgcgtactgtgcgtgtgtgtactgtgtgcatgtgcatactgtgtgtgcatactgtgtgtgtgcatactgtgtgtgtgtgcataccgtgtgtgtgcataccgtgtgtgtgtgcatactgtgtgcatactttgtgtgtgcatagtgtgtgcgtgtgcatactgtgtgtgcataccgcgtgtgcatactatgtgcgtgtgcttctctctgtacacatttgtctcagcgtttctgtacctctctacatgtacattcatgcctcctattccacctcatgggggttttccatatttgtagctccatcttctgacagtgacaaccttggtatcctttgtccttattgtattggctaatgtggtgcctcctcctgtgtgaaccctcttctcctctctgccattgctgctcctctcagacccggttatcctttgccatttcaccccaatatctgcctttctcactgccctggtccaacacccatatggtcacctttctgcagccacacctctccttcttcctctgcacgggctcagggcccagtcagacttgagagctcattccaggccagtgtggctcccatcatcctgagacagatgccagctttgcccagacccaccttgtggctttaggattgttgaagaagggattttagcattttcaacaagtgctttaggtttcaggcctggtcagccgagggaaggatgatacaccagtaaccaagactgggacgggagctgggctggctggcagatggtggggtaccatttcgcacatggtgaggtgcttgtaggaacctccaagcggagccaccatccagtggaaagtggatctggtgggagaagagggctcattgtagactagaggacccaggggaggtcagcgcctagtacgaactagaccagagggtatcgggcagaggcagggccctgagggtgcagagaggggtgccaaagaggaggaccagggtggttctggatgagtgcgtggaggagcttctggtcagcattgtcaaggctgaggtggtgtccaggctgattgtagcaacctgaagagtgaaggcagatgaggtggtgaagcttgtggggcagcttggccaggaaggtgaggagtggggtactagtgttggggctgggctcagtgatgggtttgctctgccttcctcaagatgagaatgacgggggccatggaggaagccaaaacagggattggtgcaatcaaattacttacaaacatgttaccgtttagaaggcagacctcaggattttatatttggtcttagcattttgaggtctattactagaaatcgagatttttgtgttaatcaagactccagctttattccttccagctgtgctacacatttaactgttttgggcctcagtttcctcatctgtaaagtggagctagtgatgccgtgtacctcatggcagggtgggggaattaactgggagcagagacctggtttggtgcagagactggtcctcacctccgccgccccaactctagtccctacttctaccccaacatcacaacacctcaaacaccccgacccctacgtcacagcgcctcaagcatcccgacccctgcaacactgtcttagtctgttgttgctgctgtaacagaatacccgagactgggtaatttacaaacaacagaaatgtatttcacgcagttctggaggctgaggagtctaagataaaggcactggcaggtctgttgtctcttgagggccctgtccatcttccaagatggggctgtaacactgtgtcctgtcacggtgaaagggacagaaaagcagaagtgtgcgtctagttccctccagcccttttatgaaacacgatcgcctcctgaaggccccatctcttcatactaccacattgggcttccgttccaacacgtacatttttggggacatattcagaacatagcactagccccagtatccccactccagatcacccacacccccgcaacacgccccagtaccgccactccagatcacccacacccctccccaacacgccccagtgctgcatggggagcaggggccaaggtgctgcatgagctgcttcctgaatccgtgcctcttccgctgctttctgtagggctgactacgaaagagggctgcagtgaacacacctcactgagccccactgccgggcatgtagccttgcaggacggccgctcactcagggttgaaggtctccagcagattctgggagtagatgcacggtgctgcttatttcgttttacaaattaaacatccaatatgcaggtagcaatgtgtgtgaatccccagtgctttatgtagaaccctgagtatggggttcatttttgggcagggtggggtggagcggaaggtggtctgtgctgatgtcagaggggtctgagaagcttgaaaaataagggtaactgtgtgtgcctgaaccatgcaggaagacagcactccttccagagatgagggagagcagacgtcatgtctgtgagcaaacaaggggcccatgcccagcgtggctctgggtgtcatggcctccctgctaggtcatccggatgaagcctggggctgtggagtcagctcgtgagaaatgggatccaggtcctgagcgtgctggaactggcgagacggggtcacagcacacacctgcgtttccagccctgcccctgctgacggccaagacctcttttcccacccctgctccgcccccctctggataataagttgctgttctagttcatagaagtgacacttgtcccttttcagagaagcaggggagaggctgttttgttttatggcccgacattaaatactacaacagtaatactaaaaacaatcctgctgaagagctgcgcgtgccccactcttggggaactctgctgtggcagcagagtgcggatgagctgcatgctgagcagggagtgtcatttagcggaaatggttttgtgtgccagctaatggtagctgtgtatcagaagaggtgagaatgcaaaggtttgtcagatgtgtggaaattctgtcatcccaagggaacgtttgggaggtcttagctttgtttttctcttcttaatgcaaacacgtgagcattaagagaccttgggtagatgagctgaaaatagtcgtgatcgcccttggcggcggctcgtgggtttacagagcacttgcacagacttcgtcattgattcttgcaaccatttgggattcatagaccagtcaagttggttaacagatattgattaggtggaaacgtatatgttaagcatagtgccatatacaaggaactgtaagctgtgctcttgctttcaaggcactgatagtacacctggggaggtaagactaggatccatgcagtagaacagagaccaatacgaggtcaagcttgaacggcctggaaggccagagaatgctgcggtagagacgtcagggcaggcagtgggaggcaagagcaaagagctgaaggaagagcatgagcccacactctgaggtccgaggggctgggttttcgcacaccagctgggctccctttgggcctggggggtcagtagcacccgttagccacggccagtcacagccgtatgctctgtgcacacagctctgtgcccacagctgaaaccttggctctttggggcttatggtttaaaatgctgttttcttttcttcctttcttttttttttttttttttgagacggagtcacataggctggagtgcagtggtgtgatcatggctcactgtagcctctacctcctggactcaagcgatcctcccacctcagcctcctgagtagctggaaccacaggcatgcaccaacacgctgattaattaaaaaaaaattattgtagagacggggtctcattttgttgcccaggtttaacatactgttttctctgccagttccattggtgtctcaaggtggtatctctgcttcccctctgaaggaatctgaaagaagggggttaactgcttggagcccacctctctcctgtatctactttccaaagtgaggacagttttttaaaacaggacatgttcatcccctcatatctgctgaaaatccgtctagctcttggtttttgtataatacagcaataggcaacacaggaacgtaattttgtagctatgtgaggagtgaggcctagtgttagaacggggccagactgtaaaagatctcgctcctgtacggctcccgtcctagtcccacagacgctgcaagggccgcgggtcccggccgaagctttcctgtcccagatgcctgcagctgtgtggctccaagctttgcgcctgagctgaggaagatcacacgcctctcactgtatacaggactaattattacaaaatagacagggatggcattatggttaggaaaatatagactcattaaaaatcatttctaatttcaaagtagcccctttgctattatgtattttctcagtcaaaaatgagttgtttaaggctacacaactaatgagtggcagagtccttgaaaaccacacagagaaatttgcacttcatctagtaggcagcactcaatatgtcaattaaaaatgtttattaagtgtctgctaaatacacggtacaaagaactacaaagattgtccgagcagtgagtgctggatggggctttcagtgtgaacttttcactgaaggatagcacacagaggaaactgcacctaacccgggtgtatcctaaactgatcatacccatggaccccagatcaaggaacaagatgaccattggcccagaagtcttatcttgtcccctttgggtcccctcccccagctgcactgctgggtctccactcttggcagctttccatctaaatggagcacacagcccgcactgtgggcttctgaggggaggggtcagcctgcgctcatcttcagggtggactgagaagagaaagactaggtcattggtggccctgtctgtgcctggggcaccactctttggggccattgggccagattgaggaacccagctgggaggtgggagagtctcagtagcatcgtgaagggctgcggattgggtgaacatgttagcagtggctggtggagtgccagctctttggaaggtgaaatggataggatgggtaatcaaactgggtacataggaagaagatggagaggtttaaaaagaaaaagctgcaccccttcaggttggctgaatgccagcactatcaataaccttggagcaagtcatttgactgctttaaacttcagcttgcccttctgtcccatgaggtgggttggaccaagttcctttcagtgtaaagttctaagtatcttgaaattcagaggggttatgctgaaaatcttgcaaataggaaaatttataaagaactaaaagttttatgcaaataccatttaccatctccttttccatccacctacccatccatttcattcatcaatttacccacacactcactcgccgctgaagtttcattagttctttcccagattccccttaaataggagctcataaaggaattagaagagaaatgttttataagacacaactacagttttacatttatgatctgtccacttcaccccacatcagactgatactgttgtcaataatatctatcggggaatttaattttagtttatttaaattatacttaatcaaatgctaaatgcatcgtttcatttgacctcattctttcccgtctcttcctctgcttctcatttcagctctcccacccactgccctattcttggaagggaaccatacaattaactgaccacagggattcccagtggataggcggttatagtgccatgtagctggtcacggcctggtgagcagctgacagtggtttcacccctcctgggtgggcaggtatcctgacctgagtcagggcagggagagtggggcccctgccaggctgtctctactaacgagggccgccatgtctctgcaggatgttgtgagggatgcagggaagtggctgcctcctgccaacactggggagagggtgggatgggagaagggcctggactttccaaggggtgaaatccaaggagggggtactccttgaatgggaactccctcccttcttcctctgtccgtggttcactggagagcatgcatagtgtgagccaccgctgaccgtcgtgatgcatggacagttttctgaccatagatgacagccgcgggccgcgaccatgctggttgctgcagttaagtatgggtgactgaactcaacgccttccagccagccctgtgcgtttactttgctcctcctcatgcatgcggcaaggtcgctctttggcatctgtttgttaaagctgttttttgctttcctttgccttgtttgtgtacttcgtggcccctattttttgtttttcagatcccaatccaatcctatcttgtgggtctgatcacagcacagttgatttgggtcactatgatttttttgagaccttagaactttgttcctgagagaaatgaagaccaaacatgtaacgtctgaagtcacagattacggattataacaaatttaccacaattcttccagagaagttagatattacctggtttttaccaagcttttctcagccagaggtgtccattgaattagaaccattgaattagaatttccagaaggttagggcctggcatctctgttttgaaaagcccttgatgactttgacctatctatgggcgaaggccctttccagttgtaaaatcttattaacgtcatgatttttattttatttttttatcagagtaacatacatatagctaaaaaaataataattaaataatgccaaaaactatacaggtggctcttggagatcctgcgggtgtggctctagacgactgcaataagtgagctacatgaacgttttggtgtccagtgcatataaaagttacgtttacactgtactgtagtctgtgaagtgtgcagtagcattgtgtccaaaagaacatacacactttattttaaaaactgaaaaatgttaatgatcactggagccttagcgagttgtaatcttttagcatttaattggctgacggagggtcctgcctcatgtggatggccgccaactaatggaggaggggtggttgctgaaggtaggggtgactatgggaatttcttaaaataagacaataacaaaatttgctgcattgattggctcttgctttcacgcagcatttctctgtagcatgtggtgctgtttgatagcattttacccccaacagacagacctggagtagttggcagatgttttctggaaaatgaatgacatgagcctgtcacattaaggaaaacaactgacagtgtttgtttccactgataaaatttgagatttcaaataaaaaaaataaaatttggaaaccttgtacctaccactatgagcctggcaacttcttttttgttgttgttgttgttgtctttgagatggagtctcactctgtcgcccaggctggagtgcagtggcgtgatctcggctcactgcaacctctgcctccagggttcaagtgattctcctgtctcagcctcctgagttgctgggattacaggcgcccagctaatttttgtgttttcagaagagacggagtttcatgttgctcaggctggtctcaaactcctgaccccaggtgatccacccaccttggcctctcaaagtgctaggattacggtggtgagccaccacacctggccgagcctggcaacttcttagtacttaagacatttctgatgagctcatggtaatgttaatgagtgtggattcttaaaaaaatattggggaatgaaatatacaagatctgtatagttcaatgagctgatattttccagatgatcaatgcatgatgatacaaaataatctatgggtaaaaaatccactcaaggtgcagcaaacagcagtgaattttaatgtcatagcatacaaaaagttcgttgatgtggtttcagatactacatctcatataatctgaaggaaattaccacttgataatttttggtgtagtatcaaacaaaaagagtcatgattatgtaaaatagcattttaagatactcttctgttttctaatgatagatatatgtgtgaggtaggggtttccacatatgcagtcactgaaaccatgaaatgccacaggcgaatgcaaaaatggatgagagtcacccatccttgatcaaaccacatattccagaaattcgcaaaaatatgcaaaaatgctgctcttctactaaacttttttggaaaaaatagttatttttgtaataaatatttatgttaaaatataatgggttattgtttttaaaatgaatgaagaaaaatatttaaaaaatcttagctgaatttcacatagagtagatattgatagattcaacaacataaaccaaagctctttgaggttttcaataattttagagtgcaaaggggtcctgagaccaaacaagtttgagaactgctgatttagagttaattgccctggaacccactcctgaaataaatgggtaaatcctggacatgaatgtacatttgtgaaacggattttttttgtgggaatactgagtgcagatgaaaattaattaaaaagtatcacttctttgtctttttctctcctccttttcctgtacccatgagagccatagtttgaacaggaggaagcatatgctgtcactgcagagctgccttctcagagaaagcctgagcaggagcctgagaataaaacagtgcaagtgcgggaaagctgcaggtgccgaaatacaaatgaacgtgggtagaataacagcattcacttgcccgtgatgttaaaacactggccttcacggcgtgtcagcttgtttgagcaccttagctgttcagtaaatctggttaacactgatcaaccttaggcgttgtgttacttttagtcaaaggtgactttgaagtgtgttatataaggagaaactgtggaagagaggcctagcagaggaggaaatgcagacgtaaagaactttctcttttccattgcttcctcagatcctctgtcgatgggtcctcagaaagctctggaaaccatcggtgcaaatttacagaagcagtacgagaactggcagccaagggtaagtgtgcttcacttgctcttccctttccttcttacagggaaactccagttccttggtttccaacactctttggatccaagtgagaattctgtgcacaccctgcccttgtgtggcatggcgcctgcgcactgcgtttcgtgtgcctgcgttctgcctgctggctattggtggctgtgttgtcttgacagcgtccgcattattgtgagtcttgcattggacagtccaacttattttgcttaagtttgttccagatttttagaaaagaaaaagtattcttttcgctcttaaccatggttttaatttttctcaggaaatgtattttcgataatttttctgcaacctcaactagttaacgctattccgcgtgtcttcagttttcacatagttgagaaaaaaacacccaacagtcaaaagataacacttattatatgctttgcctttgattcaaaagataaggttctttttagggagccagttaccaattagtgtgtgggtttttttttttttttttttggcttatatcttacagttttttgtttgtttgtttaaagaaaagtggcttagaatataactgtgtcaaattgcctttaagatcttaagttacttgtaatccacccaaagacctttagcctttcttattaactggtttggagatttaataaatttaataaaaaactaagaatctgggcacttatggaagtgccctatattcagctttgcatgatagatggactcgagttacctaaaggaaataatgaagaatgcaggttgagaaggtgcgcgtctcctgcaagttttactctccccttttggatgaaagcctcatgaaaacacatgatttatggaaccttttgaacacttatttggttggaattttgatttgtggatcatttatccacatgatgtgggatttagagattccttatacattatttacattcttagagtaagagaacagccaaaaatgaattttttcctgcctttaaaaatgcccttaggtcatttctgctgttgcttccagtcatgagctaattgttaggaagcatctctgtgtcttagggtgtacctttgtgcttgcattgccaacttgtcaagtcaataacagcagacttttgttctttagaaggcagtggcttcatgggttcttgactgatgcctaatggcttgactttttcctctcttaaattggttgcctcttgatggtttgtgtacacatgctgtagcctttttcttgagggcgcagtgcgtttggggatggcatgaggactggagagagatttggatggtggagtcctgtaaaaatgtagttgagatgcctcgtgttttccatagataatagcttctttgaagactttgaaggtaccctagggtctcagcatggtgagacgggcacttgcaggagtgtggggcagagtggcagtattagaagacatggccgtgttggcacatggcatgtcgttaaccaacactatgggaattcagaggaatgcctttctggctacttctggccatctcctgggtttggctttgtacctttgcgttttactagatacctttgtttaaaaaagaatgtaacccaataaattcagatctaccaattgtgttctttctagaatgagtctctgctattaaaactagtttcttcttttccaagaattattagataaggaaatatagcctttcagaatacatgtgtttaatatttcaagatattgtatgtgtattccatttgctctgatttacaattgttttttttgagtgctaagagttgatttactgctggctttattattagtttcgcttggtagatatcagctagttgatgctagctgacaggaaatggaatcttctaaagtggcatctgttatttttaatctaaatttctgtctacgagcagatctctccatggcattgagaagcggcatcatgatgtagggaaggtgacctttacatgtaggtcagtgatgacagccagaaagatgacagtgtagactcagtacaggatggaggattccctgcccatgacagtggcacagttgtattcggacagcgagcacaggtgcaaaggggtgcagtcctctgaatgatctgtagtctgggaaaatttgttaaagttggccagatttcaagaatggatgtgcaaaataattctctgagtaagagatcgtttgaagggctggtgagatggagaatgtgttaagattacaggatgcttcggaaaaggtaccagcgcaggcgggatcccatctgggctggtttataaagtggaatctggaataaagtatccgctgcagcctagaaggaagctgttcttgcacacagagtgggatcttttgtccccattcaggaagcaaaaccacaacaatggacacctaatatttgcttttcgaatgccaacaccattgcattcattttttagtacaataaaaatgtttaaaaatttcctgctactatccatgagcgggcctcatctattttagaaattagcctaaggtaacggatgtcacaggatacctctgaccggctcccaggtgtgagcgtggggctgtgccatatgcactgggtaataatagcacttgccccggtgcgcgtggcacactgctcctcacagctttccgtgggttacaggacagagggagggaggcctggcatagatagcgtggctctcagtgtggggcagacctcatgctgccttctagagtttgcatgaaacaggaggcacttagcaaactcagatgtttgtgtgcaaggggcctggttcctgactgtaaatcagggtcctttgaaacattgcaaggctaaacacgcaccacttgattgcactctacagggctcttgagtttctgcagtaataaagagaggttgatgtgccatctgcaataaaacaatgggggcgttattaaatttcccagaccttcagtggaaagacccatatatctggttttctctttctctgtgtctttattgcaagagtggaaaaccttgggtcatttaatgaaaatgagattattttcattaaagtttgtcggagtcgttgcctccacgctggcatggatgggagcagagtaggaaatgcctgttttctcaacggtagcgtccatccaggaggtgcagaaagccaaccccggaacccccgtcggctgcaccagaatggtgtctggaagcctctgatgatttccttgctggtgctggaacgcttggacttgttcttcatttttctagcttttgatataggtgattccagttcaaaaggaattgagagaaaccatggtgattatatttttttctgaaggctgccagccactatctggcccgtatttccttgcttaggcccattgagcccttttctaaataatttatcagtttgccactgatgaaatgtttcttctgattaaatttaaggctttgccttattaccttgtaggtgtataaatttgtgttctgccagagattggaggaaaatgccgaccgttgtttcagtggaaaattctgcagtaaaacctcactcattccatcataagtctcaaatgaaagttttattgggaaatgggagtaggagattattataaagctgggaccatacagtgaagaatttatctttttagagaatttttctaacaaattggggctactggcagtttagtacaggatggaagttaggagctggagcctgtggaaaaagacaagcaggaggggcctcgctctctgtgtccttctttccccagagagagtggacaacaccagaagcagaggccacacctctttacttggggtgagctttaattcttctggtgccttaaaaataagtttctatgggaatatctatcatttactaaggaagatgaaacagcatggcggtgcctccactgaccaagtctgtccgtcgggcaggtgtgtctaggggaggaggcggaaggcgctcctcagtcatggagccacgttgttgtaggagctcattctcatcttgtccaggtctgcgagtagtgaaggcagcaagtcctgtgtggcggccgtggggcttccagggagctgagcggtcaggttgagtcagtttccatgtggtggacagttcttacttatccatgcacagccctggtttgtggattacagtgaacagattttgaatgtcagcttcccttcagttcaccgtgcttctcagatgtgtcacagttaatttgtggttaagggatgaaagttggttttgccattagataaacatgttttttatagtgcctaaccccaagcagagtatgttcaaggagagaacaaaacagctcccaagatctggtccattagcccagtagaaattgttattgcattttaatgtaaatgacagtcatcctttcgtggtattgataatagagttgtttgtgtgcttttatgagatgctttgaatgaaccgaagctgatgactatacctcctgttgggaggagggggtttggggagcaagggggttgagaaggccagtggtgggcagttttggttctacttaacaggtgtgtcttttggattttaggcacaagtgttatttgcagaactgaatgtttatgtgtaattccatgttgtttaggggtttggagtgaggataattggaatccaggcatcttctccttgtccctgaatggggctgctgcttgacctgtccacctcacagggagtgtcatgtggccatgtgtgacaaactgtgaaacccttggtattgagtgctcacactgctaggtgtggtgggaggcgcctagtcaggcagccgggttggctttggggagcactgcatggatggcttctaagatccacttgtcttctttcccctgggatgattagacaggcctctgctttgtgggcaaagcaattggtatcagcacaagtcactcgcttccttgtgccccccacccccaaatgttttggaatgaattttatagatggatgctgatatggcttggctgtgtccccacccagatctcatcttgaattgtcactcccacaattcccacgtgccatagggggaacccagtgggaggtaatcgaatcataggggcgggtctttcctgtgctgttgtccgtagtgaacaagtctcacgtccctgcacgagctctctcttgcctgccaccatccatgtaagatgtgacttgcgcctccttaccttccgccatgattgtgagaccttcacagccatgtggaactataagtctattaaacctctttcttttgtaaattgcccagtcttggttatgtctttatcagcagcatgaaaatgggctaatacagatgcagtcaagacgcataaatcagtgggttctaccttttcttaggattttcaggctcagatatggataatcggggaagaagcagctaagttgccctaggacagtactccacacctggaggtgctccaaagctattcatggaacagcccaaggtggaccgttactcgctgtgactcctgcttggggcattcacgttgcgacattagttccaaattgacagtccagttcagctggtgaaaatggccctataattgcgattggcagcatcccttggcgtgcggccctgatgccattaccattccatcatccatcccgtcttgctgtctgccctgccgccagccctccctcctcctgcccaaactcacctgactttcttctctgtgggtcctaaggttgggcttcatccaccttgagtttctgtgacaagctgccagtgaggactcatgggcaaaggcagaactgtgggtggatggctcacagcttgcataattcagtacctggtgtgaagcactttgcctgtgtactcattaaatttgcaggacggtacagacaatatcttctggtggtcttggggttaactgtggtgctttgacagtttcacttaactgcttactgcccagaaagttaagaactgttcctatgatcaatgtttttacttatatttttgccttggcctcagcagtgctctcccacttcgtcttccctcctttctagtgcttctcgcctgaaagcttttccacgtgcgtgccgtgttcagtgagaactctgattcatgctcttcagccagaagccttcgtagtcagccctgcccacgcacttcctgccttgccctgtccccagaggccatggtattggaagcagcttcctggaagcaagcttagattatgcgaagcagtttattccggactctttagaccaattgcaccagagcataaaggtgttgtcacctactgctatccctccgaataccttagtgacatgacctataaattcttttaggcacaccaaagacattacagaaagaagaatgaaagaaaggcatggttctgcagcctcctggaggatggcagcctgttgtgactagactcctcagggtttcagtccattagagctggtcccagaggggacccctgctggccagccctgtgttggactcttgctctccgaggccacctaggggattcactagagagcccatttgggattgaagagcacgcgtgttgactagagtgggttgcagcatgggccgcagcctgtttaaacactgcctagggaagattggtggagtccgcctcctcccttctgcctcgtaggtccgcagagtcgtgctgggctcaccgctccttccctttctgggcgggagcgcccctctcactggtaggggagctccctgggaaatgtggtctcctttctaccagtgcactgaggggtggggtggggagagcttaactgtggaaagaatgcgaactggtttagttctggctttgccacttcttagaaatgtaactctggacaaattactatttaaacttttaaaatttgtacatgcaaatgagagttaatggacagaataaaagtatataaagcatttgcaccagggaggccatggtggttggtcatcagatccttacttcccatccctttctgtcccttatcccttcctctccctcatggttgaggtggtggaggcccctcccagaacattctgcccaggagtcttgctgccttaagcccctccccatcctgccttatctctggttttatcctcttgcggggataactgcattcctgactcttcctctattaattgacctacttgaagtgtaatacttttagagagaagtaggggcttaactctgtccttaacaggcctctcgaggatattatctctcatcatcatgttccctttaacaagggagttgtctgtgtgtatgacaaattgcaaatgaggaccccccaccgtcaggctggggactaaaactgtagctcagctgttgtcgtttcacagatctcacgtgccatgtgtgtttcctgagttaacttggggaccgtgatacagagcgatgcggagatggctctgaaggacaggcaggtgccaggcgagggatggaagtgctgcttctaagtcagaaagtggaaggtgtgatgtgttaaagaatggaaagctaaatttggaggtgacgatgaggaacccaccgtatgctcgccatatgcaactaggaagagttgtaaaatcctgctccagccaaattggaaagtgctgatcaagggggaaacgatcaataacagattggagggggacggccacttcaaagtgtctgcggtacttgatttcattttgcaggggaaaccatatgtcacagtggtgttcatgaatttgggtgttcacaagggcttctgtacagctccctcccaaatgtccgcgatttacttgttggtatgacacataatggagatttttttaaaatggacatacgaagcacataacgtcaagttcaccattttaaagtgtacaacttggctgggcgcagtggctcgcgcctgtaatcctagcactttgggaggccgaggtgggcagatcacctgaggtcaagagttggagaccagcctggccaacatggtgaaaccttgtctctactaaaaatatttaaaaaatggccaggcacggtggctcacgcctgtaatcccagcactttgggaggccgaggcgggtggatcgtgaggtcaggagatcgagaccatggtgaaaccctgtctctactaaaaatacaaaaaattagccgggcgcagtggcaggtgcctactgtagtcccagttactcaggaggctgaggcaggagaatggcatgaacccgggaggtggagcttgcagtgagctgagatcacgccactgcactccagcctggggcgacagcgtgagactccgtctcaaaaaaaaaaaattagctgggcgtggtggcgggtgcctgtagtcccagctattccggaggctgaggtaagagaatcgcttgaacctgggaggtggaggttgtagtaagccgagatcacgccactgcactccagcctgggtgacagagcgagactccatcttaaaaaaaaaaaaaaaaagtgtacaactcaattggcttttaacatctttgcaatcttgtgcaactgtcataactgtcataactgtctagttccagaacacttttcttaccccaaagggaaacccaaagcccatcggcagtcatttctcctcccccaggcccaggcagtcaccagcctgccttctgtctctggagatgcctgttctaggtactccacacaaatggagccatacagtatgtggccttttgcgtctgggctctttccttagcatctggaatgttttcaagattcctccatgctattgcatgtatcagtaatttaatccttcttgtgtgtgcatgtgtagagatagggtctcgctttattgctcaggctggtcttgaacccctggcttcaagtgatcatcctgcttcagcctcaactctttctatagctgaaaaacattccattgtatggctagtctacatttctattttatgggttcatctgttgatggacactttcatggtttccaccttttagctatttgaataatgccgctatgaatatgtgcatgctagtgtttgtgtgggcccctgcccactagtggggttgctgggtcatatggtgaccctgtattttacctccctgaggcactcccaatctattttccacagtggctgtactatttgtccatgtctactagcagtgtatgagggctccagtctctccacatcctggccaacatttgtcactttctgtattcttacattgttattattatgatagtcctagtgggtatgaagtggaatctcatcgtggttttggttttcatttccctgatgattagtgatgttgccatcttttcatgtgcttattggccatttggaggagtctctattcaagtcctttgtccattttttagttgggttgtttgtctttattgttgagttctatgagttcaaaatggagacttttaagttgaataaggtataatttctgttgtgaggacttgtttcctttccaaataatatgtgtggtgtctgctgagagcctcatggtaacatttaattcttaaaagagcctttgtcttgatagattggtttcataaaactgttaagaggttcagccaggcaccgtggctcatgcccgtgggaggccaagacaggaggatcctttgagctcaggagttggagaccagcctgggcaacatagtgagaccttgtctctaattaaaaaaagaaaagaggttctttgactattgactatactgatcatatatatactgtataatttaataccaatcccttaagattcctgtgtgtttttgttaggagtcttttggttttcttagagctgtggtctctccacctggagtgtatgtcgggagaaagctcctgtcggggtgagtgcaggcagagtggccgaggagctgggcctctgtgaagtctgggtgcagcttggaggctcatagtggactgggagcttggcaggaggggcggtgcatgtccacaccagtgcccggtctccgccgtgctgcggccctgtgggtctctgctccccactcagcagttacgctgcaggacgttccttcccctccctgtgtgtgagggctgggtccttcctttctgatgtagtcatctttgatgggactccatctgcttgggcccaggggtccccacaggagccagctgtgttcacatcctagtggtccctggtcctaaaccacctcctgactttcctctgttgcttcagcttcagctctctgcccactgcattgtgtcgctggattttcaagattaaattccccccacaagagtgtttgatgcttccctggatggccaggctgtacggccagtgttaaaagacagacaagtgccacccaggggcaaggggagtgtgtggttcaaagtccctgagaacagatgccagatgccaggctcaggtggtgccgtttacttccagcaagaggagagagagggtgcacttgatccagtgccgggtgatggtggcccctaggccagggggtcgcaccctcactttgggctacagtagaaggagattcccccaccccgtggggtcttaaacacagaaaactgggggcatgcctgagggccactgatgcaggtgctaaggcacaacagaggagccatggaggcagaaatcgggaaagacccctcccaggtgagggctgcacgggctgtggtgagggtgctcccctcggtgggctctcggcccagcacgtggaagacggcgcagtccactgccttcccaacccagagaggccgatcagctccgcttagcttcacgtggtcctccgtgtaactggcccatctgtgggttggttctgagggagtgaggctgccctctagaatcacctgtgactggagggctgggtggcaggatttaaagcgcatagcagaaccgggaggattacccatggcttgtataaggaagagtctcttctaaagggttgcatgtgtggcaggctccttaatcaacatgctgcttaccccggactggaacatgccctgaagtcaagtcatttttgtgtagaatttttaattataagttttatttttataaacaaaaatcttagctgaagtccaataaaatccaagaagaaggcacagataatcagggagaagtaactcaagatttgaggaaatcaagagtcataaaagagtgctttgcaaaactttgcagataaattggaaaacttgtatgcgatgcataattttctaggaaaatataaatgaccataattgacctcagaaaagatagtaaagaaaaataaatggataaacatagaagaaagagaaagttaccaaaccattcctcttctaatcctcctccctctgaaggatttcaaacttgaaaagaacacaaaattattgaagacttctttctgttgtaggaagatctctaaaacatagtttctttatctattaatttagagacagagccttgctctgccatccaggctggagtgcagtggcatgatgttggctcactgcagcctccatctcctgggcccaagtgattctcctgcctcagcctcccgaatagctgggactgcaggcacatgccaccacacctggctaatttttgtatttttagtggagacagggtttcactatgttggccaggctggcctcaaagtcctgacctcaagtgatctgcctgccttggcctcccaaagtgctgggattataggtatgagccatattttttgttttttttaaatttatttttattgatttgtttttatatttttagaggggtcttgctttgttgcccaggctagagttcagtgatgcagtcagcttactgcagcctcaacctcctgggctcacgctatcctcttgccatatccttttgagtagctgggactacagatgtgtgccaccatgcccagctaatttttaatttttttttttttttgtagaggtggtgtcttgctttgtcactcaggctggagtgcggtggtgtgatcatggctcattaacctcgaattcctgggctgaagtgatcctcctgcctcagcctcaggagtatgtaggactacaggtgtgagccacagtgccagcttaaaatacgtcaaatttaaaatgcaaaagaagaaagtgtattcaacaggtttagtgtatgcacatatgactgatggagtcagccgttcctgcttgtcatatgtaatgtgtgtagctgggtgtggcatatgtgtacatgggtgggtagatccctagatagatggagggcaagtcggtggatctgcccctcctccactcactcagatgccttagagtgaacacggaagggagacatcagcctgtggcctccttagtcgttctcattttccttcgcctcttggtgtcttgctgtgttgactgattctagttttgaaagcagcatattgggtcaaaatacatttttttttctttgagacagagtcttgctctgtcacccaggctggggtgcagtagcgcaatctcggctcaccgcaacctctgcctcccaggttgaagcgattctcctgtctcagcctcccgagtagctgagattacaggcatgtgccaccacacccggctaatttttgtatttttagcagagatggagtttcaccatgttggtcaggctggtctcaaactccttgtaggtgagccacccgccttggcctcccaaagtgctgggattacaggtgtgagtcaacacgcccggcctcagaatacattttaaatcaggtctgtactgacttcagaatctaactccagaataaaatttgattctaaggggcaacagtaccacaaatgaggcgaagcacagaacatctgtcaccgtgacttggggcagatgcagaatgggactttcacctttttacacaaaacccttctatgtgccttctgttttaaaaccatgattttttttactttaataataggcaactaatttaaaatacctattcaccatgtgtcatctcagagtaggaaggggactgtgaggcagacggagccacttgggacttttgcctttgggttgtgacatttgtctgtaggttctttcacttctgtccatctcatttgtttctgtgccatgcgtgtgacatgatgagctggaaagactttgcatggggcccacgtgagtgctcacatcgaaggggcaagtgttaatcaccctctagttgacagagctgtttcagggatggctagttcctctgtccggaacacttgtattgagtggcagggagccgcggggacactgcccatagcggtgggagagcaagcaggaggggctctgcccagggctgtttcctttgcctttgtttaccagcataaagtattaaaacagctaaattatcatgggcattttaatccaatttctcagcgtttcgtcatttgaagaatagaagtctctttgttttcacagccctgttcttgcttgtttaaatttgaatatatttctattcattcagctgatagaaattctttacttttaaactgagggagaaaaaagaacagattgactagggatcagaatgtgatttcagtgggtctttattgggcccttgttagggaggggtttggacctggggacttggagtctacactgatggcagaagcaagctccagaaaagagcaggctccagctttgcaaggtaaaccttggagagtgtagttagggtgacagccagcacctctccctgctgagtggagagggaatccagatttttaggatcttataacctgatatttttcatgcctttgactcctgtcttggtctgttaggtcttggcttttgatagccaaagtaaccagctgactttccttctttttttttgaaatctcctttactttttcacaaggctgtttctcagtgtgaatatgttgctttcatattcccagagcactcactgaatgcataaaggctaagcaatgcagcagtgatactactaaccagctcttagtttactgggtgacctttggctggttctgtcgagtggccactctacctccagtttgccctgtctggagatgcagccaggactgtagattcccaggggagggctgacttactggggcatttatttactggataggggagtttttaatcttttagttggaatatttagtccatttacatttaatgtagttattgatacactgtgtatctggggttaaatccaccaccctcctatttattttagttttgtctcacctgttctttattttttctcttttcttgatttcttttgcattaagcagtttaaaaaattattccattttctccttctattagtgatgtatcagagaatacataagctacatatttgtttcgtggtaaccctaataaattactacatacccttactgtgagaagtgttgaagttagcacttgcaccacttggccagacagtgcaagaatcttgatgcatttaaccctcctacccacccccctttactttgcatggtgtcaacatcatggggttggagtttctatgtggattttaaaccccacagtatacagtcaatatttatttagatttatctgcttctttacacttattaatgttctttattctttcctgcatttctgtccttctgttcagggtcatgtttcttcaacctgaaaaacatcctttaatatttcttttagggtgaggctgccaacaacaatttagtttctgcatattttacctctatttcatttttgaaggatatttttgctgtgtgtagaattctatgtcaacttttttttaagtttaaaggtgtttttcccttcatctcctttctgttaaaacgtcacactgactgtaagtcttaatattggtgctttgaaagttccctccccgcacccccctgtccagctgatttggtttgtattactttacggagatgttcttagctgtggactacttcatatgtatcctttttggtgctccttgaacctgtggcttgatgtttctaagtactatcacttaagacactggttctctgccattctgtctcccctgctgacgctcattggaataggttagaccttttcaccatgtcctgtacatttctcatgttctgttccgagtttttttcttgctgtaggtcactgatcctctcctttgctgtggggcacagtctgctgtttagccaacctaccaaattcttgattccattgtatttttctattctgtgatttccattcgattctttatcaattccagttctctggtgaaaattttcaccttgttatctcttttcttgtacacatcagctttcagttctagccctccttacatcaacatctttgaaatggggggtgtgtgttgccatcagtctgactgctgctgatggcctggactcagctgttgctgtcagcacagtgtggacttgagggcatgactagacagaggccagtatttgtgccgagagccacagggctcacccgtggagggaatctgagtcccgattgtggaatggtggtggcagcatcacgtcctgcaggctggagcccatgagtggtccccgagagattgcctccgagcgctgttaggagagggaagagctgcactcatgcacacagggtgaccctgggtgaaatgtaggctccatggctccgagggggaagtgggctcagaagagtgggcttctgatctgaatccaagaagggttaggaataccttagccagtttctgtggctgctttttttcttttgaaacaggctctcgctctgtcacccaggctggggtgcagtggtgcaatcacgggtcaccgcagcctcgacctcctgggctcaagtgatcctcccacctcagcctcctgagtagctgggactacaggtatgcgacaccatacctggctaatttttatttttatttatttattttttttcagttggagtttctctctgtcgccaggctggatacagtggcacgatcttggctcactgcaacctctgccacctgggtttaagcaattctcctgcctcagcctcccaagtagctgggactacgggcacgcaccagcacactcggctaatttctgtatttttagtagagatgtggtttcaccatgttggccaggctggtctcaacctcttgacctcgtgatccgccccttggtctcccaaagtgctgagatacaggcgtgagccactgcgcccggaccatctggctaatttaaaaaatttttttgtagagataaggtcttgctctgttgctcaggctggtctcaaactccagggcttaagcaatcctcctgccttggcctcccaaagtgctgggatttgagcatgaaccaccgtgcctggcctgcaggtaatattcttttgtgtatatataagaatttaaatgaggccgggcgtggtggctcatgcctgtaatcccagcactttgggaagccgaggtgggcggatcatctgaggtcaggagttcgagaccagtctggccaacgtggtgaaaccctgtctctactaaaaatgcaaaaattagctgggcatggtggtgggcgcctgtaatcccagttactcaggaggctgaggtaggagaattgcttgaacccaggagatggaggttgcagtgagccgagatcgcaccactgcactccagcctgggcggcagagcgagactgtgtctcaaaaaaaaaaaaaaaaagaatgataaatgagaaacatgtctgagtaagttgataatagctcttcttactaagtatcagataaaaattccaaagagaaagtgttgtgtcgtgtcatgtcatagtttaattggcagttttttccttagtgacatagaagacagtgatggatcgtacaacctttggcaccttagagtttatgaaaaagtagcatctgttctatagaaattatggccacactctgaggagcagagttggggacaagagtggaaggaagagtctgatggtgacacggtctcctgcaggtcttcccagagccccattcaccacccatgatcactccctgccccgtttcccattttctttatattctacccttttgcggcaagggactaacaagggccatgcatgcctggcaacacaggcggtcccatccttcgctcaagccctaagtgacccctgctggccgcactcaatggtaactgactgctggaaggatggtcagccactgtccccaatgcaggcagccccttggtccccccattcccatcgttccccaccccatctccccacccttctctcagcaggagcctcccccataccaccccaagtcagcttcctaaaatgccctgtggctctggctcacctgctggaaacaaggcaaggtcaaggtcaagctccaacccccacccccagcccagctgcccttgggggttttcctctccctctgctgcgtttccttctcttgggcctgctcatctttctcgggctctttttcttctttgtctaagtcttactgccgacctaccacacttaaggttctcttctgctgccatcttctgtcggccctggcccctgagcacgggaccaggattggaagtggcaggggttgagggagttgagttagggtgtaagcgtggctgacttggtgaaatcttaagatttgggggagatctgaagtgccttgctctcaatgtcagtattgattgtggatgggttaggaggaggagaaaaattccaagtctcagcacaaggcgggtggctgtgaggagcagatgcagttcactattgcagagtcggagccggagaggcagaggtggaggccgctgacgccaggccagctctctaggtctcagcagaggagtcgcgcgggagccccaggactcactctccttgctcctagcaggcctcaactaacaacccttctccaccacggtgttgagccgttgatgggggtgatatgagcttgtagatgagttggggagacctggtgttttgcacccgtggcagtggcacgcttcttgggctgttctgctctgctttttatgtccgccgataaggtcggagagtctctccccggcgctcctatgcacatcttgttaagtttcttcttagagcttctgttgctgctgggaaagggatcccccaccaccccccgccccctttcttagtgggttcttaggatggcgcatgagagagttgctctttattgcctcctggttctcccagtatgggtttttatccatccagtggttccaagacagtggctgtgatgaacggagttgccgcgagtctcgtggcatttggaccctgcaccgctcgagattcactgcgctgcacaccagggcctcggtaattcagtcaaaacaacagatttagaggtgtacagaaagggccattctattttccattttgtatatttcatgtctctttaaatctcttaaagcttagaacacccgtttttcatatgcctttctaaaaacttttttccaggcgatttttagatgctatttatgtgtagtaaaatgcgtagatcttgagtgtttagtctgatgagttttgacagttgtatcctcctgcttaatcacactcaaagcaagatggagatcatttccactccccagaaagctccctcagccccctttccagtcagtttctcctggccgaggccagccgccttctgcctcctatcaccagaggctagttttgcccatggaactgaacgccccgatgagttcgtcttgtctgctgcacagacaaaaccaattcacggaggctgcaatattgtagtaaagaaagaatttaactcaaagccttgcaggtggaaggacgggagttttattattactcaaatcagcccctctgagaactcagagactagggtttttatggataatttggtgggcggggctagggagtgggtgctgctgattggttggggggtgaagtcatggggtggggaaaatggtcttctgcactgagtctgcctctgggtggggccacaggatgggtccaggtggggtcagttggttgccagaacgcaaaactctgaaaaacatctccagtcttaggttttgtaatgtgttgttttctacaggagcaattggggaagtcgcaaattttataacctggccacgactcccgagcagcaaggaattatagaaaggcaagctagggatgatggctgggtatcattagtgacatctacatcttagcagaattcaggcccctcacataatcctaatctcatggcctttcatagtcttacaaaggtggtttcagtccctgaaccaggaggggaccagttttagggagggactgttatcatccttgctttaaagttcaactgcaaactaaattcctcccatggttagctgtgcctgcatccgggaatgggtgagggcagccgcctgtgaggttaggagggaggtggaatcagccttgccagccttttctccctgtcataatcttgcccaggtggcctcacttattttttacctttttctacagtgaccacatgtgatgtattcttttgctcttgcgtttggcctcgttcactcagggtgaggcttctgagactcgtccgggcggcagctcattgctgggtgtcccggagcctgcacatccacgcagggtgcatccaccctccctctcccacaggttcacgctgcacctgtttccagtgactggcttttagggataaagctgccatgagtgttggggtgcaagtcttgtgtggaccatatatttttatttctcttgagtgtatgggattgcaggtcattgggtggttgtatgtttccagttacattttgcaagccactctaaattgacaaaaatgacaaaaatcatctctttctttgcaaagccaggcaatctgcagaggaatctttatttacagtttcctccagcactctggagacatggaagcgtaggcatcagtgagctgggaggtatttggttgtctttgaatgaattattaggtgagatattgacattatttcccctcaaacagtccacattcctgaatggcagggagtgaaggcagcctgtgcttatgtttgtgcttattatggagtgtgcacgtggatctatttaccgtgtggaaaataatagaatgaattgcttttacacattactgggcttaagaaatggaaggtgacatagcctttgaaaccccctctgagcccctccccagtcacagtcccctctgtcttcctgagctcaccctgtcctgattgggccttgtgccttcctctgcttgagactggttctgtgcgtgtgcgtgtgtgcaagcaggtgtgtgcacaagatgggctggcctgccctgctttggcacggaagcatcctccgctgggtgtttgttctgaggctcatctcacaaggatctgggtcctcaggctcccactgctctgcatcttccccgtgacagccgcgtgggcatttgctcttgaccctgtggtggctgagacagaaaccttggaggagtcactcacttctgttggagcaaaatgcaggcctcctccagggctgcgtctgggagggacttgggtggtggagtgtttatgacttagcgcagagggctcttacgtgcaaaccatcttggctgtggagcgccctgttgcctggaaggtctgccttctcatgggggctgggcttccagactcctgaaatgtgctgtgaggcttcctattctttcttaatgattaaaaatacgatttcttctttaatgcccagcacaaatgcatttagctgtgtttatttttttccctaagtaacagaagcaatcctgagaaaataattcttacactcagtattgattctctgcttcatgtgctagggtgttccccctcccactgaagttgctgctgcttcaccctctcctcctcgatggcctaccatcctgcagcctcgctccctgcgcctgcccccttctccttctcctccttcccctttcagtgcttgctcttccctcctttccttcttctcttcctcaccccactcttcccccttttctcctcctgcctctctttccacctcctcctccgtccctgctggtctcctaagaagcacttagtagcactcagaatccttgaccttggcaggcttgggaagtgttggttaatgaagggatgtgaagacgaagggagtctgagtctccaaaggaatcatggctgttgggagtttgcttgattaggagatgggccgtttattacaatgtgagttgttaactctaaagtgcctgagataaatttatagtgtttatttgcttcagaaggagttggattttttcttacaaagtgaaatatacttttctaaattttatgtttatataaacataatttatgttgttatagttttaatctgcattactcctcaaaaggaacaaaaatgttttggcttttttctccctgagctgcagagacctttttctcctgcttctgtcctctgtattctccccacccctttctccctcctttcttccctctttttaatctgtcaattaaaatatttgaaaggatatcactgagatctttgggcaaggactttacctgtttttgctgttgtcaaccgagggtgcggtggctcctcccacctgctgtctctggtttttactgggcttcctctccattatcctaattaggtggtttgccggttgttacacatcaaagacctgagtttcctggcgaggagggagggaggcatgggagcccctcattaccggcgtgcatcctaaccacactgcttgttttcttcttgagaaaatttttttcttttcttttccctttcctttcctttcctttcctttcctttcctttcctttcctttcctttcctttcctttcctttcctttcctttcctttcctttcctttcctttcctttcctttcctttcctttcctttcctttcctttcctttcctttcctttcctttcctttcctttcctttcctttccatgtcctttcctttcctttccatgtcctttcctttccttttcctttcccctttcctttcctgacagagtctcgttctgtcacccaggctggagtgcagtggcgtgatctcggctcactgcaacctccgcctcccaggttcacgccattctcctacctcagcctcccgagtagctgggactacaggcgcccgccaccatgcccggctaatttttttgtatttttagtagagatggggtttcaccgtgttagccaggatggtctcgatctcctgacctcgtgatccgcccactttggcctcccacagctgggattacaggcgtgagccaccgcgcccggccccccaaaaatttttctttagaaatgatataaagtatgaagaactcttggaagatcttcgtcggaaagatgaaggaagtcttgtttgtctcgtaaccctggaggccactgagtatctctccctcccatctgcctgtgcccgtgtatcctgcgtctgttgtgaaatgtttaccatgccttgactgggacttgtgggctgagcagggaggacaaacgttttatttttagtgactgtccctcaaagagctatactttcgatgcctttcaatatgaaatagtaaaaatcttgccatttgatattacctaaaatattactcttctccaaagttggtttgccaaaataaattatgtttattatctactctttctccttgatattatctaaaatattattcttctccaaagttggtttgccaaaataaattacgtttattatctactctttcttcttgctatgagtttaagaagactcttgttccctctccctcgatcaagcctgctgcagacacagaagatggagactagaagaagtgctaggacaagctaccgctgtcttcagggtgaccctgaagagttaggtccttgccgtgagtataggtgaggccgaaacaagtgacccggaatctaatcacagcctgggcagagtgtaggaagggcgcaaggatgaaaatgactgcttggttggacgcagcaaaatgttgattattggccatatatgcgtcactttgctagttgctgtggatataacaataagtgatacctcctactggcaaagaattctaagtctgatagggaaaataaacatcattcattcattcattcagcaaatgtttattgggattccactgtgcttcagcctctgtgagcagcgcccaacattgcccctgctgtagtggtgcagagcctcgtggggagatgggtggccgagcagtccgagaacccacctaaggagtggatggtaaactgaggcagcgccttgaaaggaagaatgctgtctgtgaagggtgatggcgagttctcttgaccagaagccatgcgaattactgcccgtgtcctctgatcgagccttctaggccactaccgtatcctcagagaaggctttatagtccagccaacagcactccaggaattgtctactcaaggaatgcagtaggtggcacttgttgagtgcattctgtgtggttaggacactgattcatcagggcctggattttcccaataaccccgggaggaaggcgttcccgtctccacgtccctttcccagcgtgccagtgctgatggtaggttctgctggatccctgccccggtgcatgttgatctttccagtacagcttgttgccccccagggaggcagggaagtaagtccataccacattggaagagttagacgggtcttggagaggctggagggggacagccgggggaagctccatagaggtggtgacgtctgagctgggagcgaagggagaccagggctgggcaaggtgggcaaagtgtgagcagacattccagtggaagccagaggagcaggctggactctgcatttgttcctactggaataaggaacaggtgtttgagtggatacagaataaggacttgatcgccttccttgctgacaagtgcatcgtgaggtgctcttttttctactcatcccactttcgaagtttctttttcttgactattttgacttaagatgcccagagttaataaagttgcataatttatcttcccatttaaaagatgtcagtggaagtcatagcaaatagtaagcccttcgcacccatgacctttgtttagctgagtctcttgggacaaagataacaagttgttgacacacgggagagaatgttagtattctttgtggtttcatgggacaaatatggaggctccttcatttgcttgatactaactgcagtttggacttaagcctgcagaggtgattggaaagattttcagtgaaatgagtggtgtaattgtgattgtgataatgcaggtgactgcttttcattcattcggttcccaccggcagcctggcatttagaaaaaagttaacctttctgtgaaatcattttagtgggaaaatccacaagggtctgccattctgtcagcaacaaaaatgccgtgggcagaacgaccttcagatgggattctggaaccacagggggtttaatgcaaacagatgacatggaagctgcacagaggaaacgtctggtttcaggcgcgggcatctaacctgccctgttcttcagtgcaggtttcagataccacagcagtaaacagttaccacatttcccttagtgtagcaggcctgaggggtagcggagaggcaggttgggcctccactagacaaagtttatcctagtgagttcttttgggttcaacttgtcaaggagggtggctactgagaggttgcctgataatctccaagtttcttccatctccatccatttttactcattactagcctttataaagtacagagtgagataattttcatcatgttcctaggctggcaggcctgggttctaagtattacttgaggtcatagagcaggcttgtgttctttgtagaaaggcctttgataggtggccgcaggaggtcttcgcgccctgtcccctcagcatgcacttgttctcccagagtcggccatggccattcttccaggcttctggagaaaggacctcctcacaagcagacagcaaaataaaacaatgaccagtgtcagagaagatgacacccccgtctcccatgtttgcacgcctcagcagttctcagccgtatgcctatgcttttacaagtgaaaaccagctctttaggtcacttgcgtcacagggatctcctcttttctgtccagctacctggcagtcattattcctcattgtttattgttagaaaccttttgttcagcagagcggctgccccagggatcacaggcagagcgggtcctgctggagtttagtctcaggacagcggcttgtccgcattcgggtttgagcatgagaatgttgttcccatgatttcagagaagaacaactgttttaaaggtcagattttattctgtccagtattctgtaaaggacgagttgaatatcaatgaaagaaagagctttagtagctgtggcagtgctgtgggtctgctgcctcccgggtgcttctcacaccacagaggctggagagccaggtgcccctgcagccagggctttgctcggggacacgcttgccggaggccaggctaccctaagtgtgcaccgagggaggtggtgggacctgcccgttctgctggctcagcaggagcagccaggggctgggggcttctggggctttctagggcgtgggaatgtgggtagggggcatttcccagctgctgcacaggccactggtcctggcctgccttccctgaaagctgagtccaaattcttcttctcttgcccttgcacggaatctgtaagtcacagaacacccggagtgctgcccttgctgcattaatagcaccagtggtttctggggaacttccctgacctcatccctgttgcatacagtagttcattctttcttttttttgagacggagtttcactcttgtcgcccaggctggagtgcagtggcgcgatctcagctcaccgcaacctccgcctcccaggttcaagcgattctcctgcctcagcctcccgggtagctgggattacaggcgtgcgccaccatgcccggctaattttgtatttttaatagagatggggtttttccatgttggtcaggctgttcttgaactcctgacctcaggtgatccgcccgccttggcctcctgaagtgctggattacaggcgtgcgccaccgcgcccggcccagtagttcactcttaaaacgccttgttatgtttctcccctgcgctctggtgacccccagacctctccatggagggacaatcttctgcaccaggagctcttcccctctgtggatcatctctctttcctcttcccttcctttttttcctgatacttctgatacttattcaaataattcattttttttgttcttcagtcgtcactttcatgtttgatttctgaatgcctctttaggcctggcctctgtctttgctcaaattgtgtatttgagacagtctacaacatcactcaggtatctttagatttgtcttgtctgagtggaattcatcctaaaattggaagctttagatgtacaagagatctgaataatagtttaaaaccattaccctcatctgaaagataaggtggtggggctgggacagagaaagtgacttgctcagtgaaatcgactgcagaccggactccgggtttcttggtttcttgttcactgtaaggtttgaccttaagccagtttcttgtcacaactgtctcatttccgaccataatacagagaacatcacctttaaattgtccctcttttatcaccatccacttagtcaccaggtcctacccgtcccttgtccgtgtcgggaatttgcgccttccctctcctttcccactccttgttctaattctcagtctttatacttaagcctcactgtcatgccactgttgccattagattttctgcttctgacctttttaagccttttaaccatccggagcgttgctgtcagcactcgattttgacatgacgcctgcccgctgcttcgtctttttctatttgtaccctatttttttgatggcactcgctacctctcacacactgtgcagttttcgtatttattgtgtttagggtctcttccccacttgactgtgagctgtaggaggccagaaattgtaatccatttggtaacagatgtacctacagctcccggccaggtggtcatccgcagtccacacacgcattcagctctggtatacgatagatgtgtagtgtagcagcacctggcgtttgcctgtagacgacacacagtagttgttgaatttgtgggacccttgataatcagccccccaactcccccccacattcatttctgattactctgaagcataaaccctccccggtagccacaagggtctcctcggtcaggggaatggattctccctggtcctaggggagcacacgctcgtccttgttaccctctctgtggtggagctgggttgcacactggaacttatcctcgccggggtcagtgatcctggaggtcggttgcctccatattgagcccctaaagcacctggccctgggaagagcgtgggccctggagcgtggcccagtatttcctcttctgttttgctgtatcctgaatttctcttctttttctttcatttctcagagtccaagtcacatcctgcttcctctgggctcaccatctctgccgtgttgctccacgggcccctcctggcctttagtgccctctgcagcctgtgctcttcgtccttgtgctgcccggcagccgatggcctttcctccaggctcggcacagtaggaagcgccaatgttcctgataatcaaatttatgggcgtgcgtgtgagagagagagagtgtgttcctgctgaagcatctcggttaaatcaaaacactctgtaattattgggttcttctttcctcttgccagaacactctctaattattggtttctttcctcctgctcttgacatttgatgtgtctatttgccctctctgtcaatagtgctgagtagaatactgcaggcacaagtcatgtttttgtaacgattttcgacagattagcattcctttaaaaaagaacttaagtcggttggggaagggggtccactcatattacaagggggatactttcaaaaatccttcaaataatggtaagagaagcagctttgcatagttgtgagggaacctggggcttactggagaagtgagcacacttctccaggcatgccatctgcagccttccttttctttctaggctgacctatggtcttctggtcactagtcattccatttggcagtagaatcaccttctcagttttgaaataggtgtaaccagtaggggaaaaggattgtggtgtgcgtggtgttctttgcgcacaaagatgaccgtggaatttttgaaggaggcaattattgtcattgtttaatatataactggaggcttaatttccaagtagctgttgtagcattaaatgtccctggctaggtgccagtagctatttccattgtacattgaatctattgcttctttttaaaatacaatggttcgtaggttgatttatctttattttaaagaaagggctaatatcacaaggtaagtttttgagcagatactatattacgaagtgttctgactcggatactggagaggaacagtggccctggatacctcctctgtgaaggtcaggttaagatctctttatgctcacagtataaagattaggtttggctgagagttacaggggagaggaaataacaattgtgtaactcaaattaaagtttgttcactcacattaagattccctagaagtagtcattccaaggctgtttagtgctccagcatagcaaggcctcgggctcctcctatgtttactttgctgtgcaaaggttctttttttttttttttttttaaatggttacctcattgtccaagatggctgctcaagctccagccattgcatatatgaggggacttcaaaaagttcatgcaaaaaaagaattaaaagataaaaataaaaaacaaacttctcagccaggcgcggtggctcacgcctgtagtaatgccagcactttgggaggccgaggcgggcagatcacgaagtcaggagatcgagaccatcctggctaacacagtgaaaccctgtctctactaaaaacagaaaaaattagccgggtgtggtgacaggcacctgtagtcccagctactttggaggctgaggcaggagaatggcgtgaacttgggaggtgaagctttcagtgagccgagatcgcgtcactgcactccagcctgggcgacagagcgagactctgtctcaaaaaacaaacaaacagacttctcaacataaggtctaacaagatcaagacacttttgtaaatgacgataccacccatttaatctgtccctaaagaacggagggttctaggagtttaactgtgtctatacagtctttttacattattttattttttgagacagaatctcattctgtcacccaggctggagtgcagtggtgcaatcttggctcactgcaacctccacctcccgggttcaagcgagtctcatgcctcagcctcccacgtagctgggattataggcgtgtgccaccacgcttggccaatttttatatttttagtagagatgcggtttcaccatgttggccagattggtgtcaaattcctgacctcaggtgattggcctccccaaagtgctgggattataggtgtgagccgccacgcccagccctctttttacattattaacagaaggaaaaatacgtttcctgtaaagattttttaaagattaggaaacaaacaagtcagaaggagccaaatcaggactgtaaggcagatttttaatgattgtttcccatgaaaactgtcacaaagttccccttgttggatgcttgttttggatgcgagcaatgagcaggagcactgttatcactgtggaggtggagggggctccctggtgacactttcctgggcatttttctgctcaagcttaggctttctcaaacactcgtaacaagcagctgtcatcgttgtttggcctccagaaagccaacaagcaaaatgccttgagcatctcaaagagcggttgccgtgaccttcgctgtcatccagattgctcttgctttgatggagccacttcttggtagccggcgctttgattgtggtttgtcttcaggatctgctgggaaagtcgtgtttcatttcctgtttcaattcttcaaagaaatccttcagggtcttgaccccatttgtttgagatttctgtctaaagctctgctctggtctgcagctcatctgagtgcagcattggcagccatcaaatggaaagtttgctcaactgtaattattcagtcagaattgtgtaagcgcgatggagaggtctgtgatactggctgttgtttgtgttgttaattgtcagtcctcttcacttagggcatgaactagatgaagtcttgccttgcaaattggtgtggttggtctgccactgagagtgtcatcatcttggccctccttaaaattaattgtccacttgaaaactactgatttctttggtgcattgcccccatcaactttttgtaaagcaccaatgatttcaccattctcccacccaaggttcattataaacttgatgtttgttcttgcttcaattttagcggaatttgtgttgctctgataagggctcctttcaaactaatatcttatccttcttactgtctcaaactagatcctgtttacacatgttatggaacaagttagtataagtttattttggggcaaaatgttttttgaagtacgtgcatagttttttttcttgaacatgaaaaccctttgtacatttcacctttccggaaagaagaagtagggaagaagaccccactgttttcctttaaggatgtttcttaaaagttacactcagcactttcacagggaggctggaaaatatctaggtgaccctgtgtgcaaatgaagaactggggattctagttatggaagggtggggtggatactggggaaaacgaacagcctctggcataggcgccatcctggctgatgctgagtttcttcttttctacctgagcttagctaaaatctcgccaccacgcccagaagagaatgcatttgctttggagttttctgtaatccttctgaattggttctaaattggtggccggcgcctgtagtcccagctacctgggaggctgaggcaggagaatggcatgaacctgggaggcgaagctttcagtgagccgagatagcgccactgcactccagcctgggcaacagagcaagactctgtctcaaaaaaaaaaaaaaaaaaaaaaaaaaaaaaaaaaaaaacaacttctcaacataaggtctaacaagatcaagacacttttgtaaatgacaataccacccatcttgggatatgatcaaatatacactaagaatatggaaatgaatcgtcctgacgtggaggtagaatactcaggtgaccagttgcttccaactaggactcagtcacccctggcttcagaagggcaggagacacgctgtgagaagctgtgagagtgttggagatttaggatgattctcagttcgcagattctttgttcagctatgtccagtctgttttgaagcctttccattttcattttaagttgttttttttcttacaaattctgtatagttatttatttctgatttggatgtctgaagtctttttgtatctgattcagctacagtttttgttggctgttcgtcatggtgcctgtttcctaatgtccttttaaattttgacagttattttcctttgaaattgaagtatgtgaaatctttgaagcttgggatgaagttggcttcttttaggactatgaagtttgcttctatcaagtgcttacaggtcctgacagtctgaggttttctatcacacccgggtcaaggccagccatccctcctctctgtttattactaggctgaggggcagaaacttttccttgcagtgccccggtggggtgggtttactttcgggtaaaccttgctctgcgtctgcagccctctgcacacccactcttctggagggatgccctccctcagacaccatgccagcacgggccttgggcgttgcctcctgcccctcaggccgcccatgactgcaacgccccactccagttcatgggctcaggcccgcggaacccggctgctctgctcaccgggctcgggcccgcagaacccggctgctctgctcaccgggctggccccagcttcactgctctcacaccagcacatccgtgaatttcagaacgtgcccctgcctgcttgtctgccccccacctccaagcattttcacttgttagtgagaggaacctggagcctgaatccaccacattgctggacattttgtgcttgtggtctttttattaccgcagatgtgatttccttgcttgtttcttcaagagcctactcttaagaggtatgatgaaatacttttgagagtgtgaatttcactaaatcacaaaatctgaaaggtgtacaagcagacaattctgaaagaaatagaaaatgtagctgagtgtctagtatcaagtgtagccatttctggtgataaattattatacgcattaggtggatagttttgtttactaagaattgaaggtaattctggaaattgataggtcagcaagcctttgcttagtgtgaggctaaggagtttgtcgtgtttatgcaaaatggtaatgtcctactgctgctttatcgatatggaaagttccagtaggttagaagtggttaagtaaagatgaatggcgaatgggatttgattaaatgtaaaagtttctgagggaagtgaatcactgtgtagatggagtcacccccggctattgatttaaatgacagttcagaaatagtatcaaaagaaacaaaatggccagcgtgtcaagaaaccagcagctcttctgttccggggtagccagcaccaggcatcagggcccccgggacctctggacatcagcgctgtgggtcgtcttggaattgacacttgagggcagatgaggcagcaccagctcctgggtgcctctgcacccagtgccctgtctccgcagtgagtgaggctggaccgggtgtgccagcatctggaggggtctgcagggtcggaatactgcatacagttggattttgaggtggagcattagctaattaactgcaaccaaaagtaaagtagcagggtggctgcttctccaggcctggaagcctgcgtggtggctgaactgcggtccccactgcagcagaaccgggcaggcctcagtggcctcaggctctgtccctgtgtatttcatggagaacagagtcagggaggtgcagggctcatcgctagccagggcacagcgggaccaggcatcctgatttgcagcctggtggcctttacctagtgccgcctcatctgacataaagtcacccgtgtgggggagagctgtattttaataatcagtttcaggtagatcccggaaacccaaacatatagaaaggtgagggacttcggttcccacctcctgagcaggtactgcctcgtgccagtggacctgggagggcgggaaggctgctctcaggggcacgctgttgcattatgccatgttgttcttttggttgtttattgtgatgagctcttattgtgataagaaaaataatcattttctcatctttagcagtgaatatacctcttttttaactgccatgttaacgtttgcctttgacagtgtgctctgagagacacaatctatgcttcaattctatgctcttcagctgtcataactcttctccatgtctttgaagtgcagtaaagaaagtgtaacccaaaaactgaacagtaattcctaaacttggcacttgctctccactctggagacattctaggtttcatttgagagggattttggcctgcttaaagcattttaacagcttttcgttggccccagtacaaagtctaaactctttacctgggaggaaaaattgcttttgatctggtccctgctctctaccacagcctcacctcccaccttccctcccaccagactccagcctcacctcccaccagactccagcctcacctcccaccttccctctcaccagactgcagcctgactgctgacatttcagtgtgttccaccttttcaggcgtttgctgggcagttttctcttcctcaacttgttaaattctattcatgcatcgagtcttgctgttgatgtcattttctttggaaactgttcctaaatccttaatcctttctaccttacaaaagaataacaaaataaaccccaagaaagatctactcctttattctttcacaggatatgattcctactccatcattgtcttcaactgtatggtgtgttgttgcgatgatcgtggtagcaggattgatatcagtattgctcactggtctctagtcttctagaaaataagggatggggacttccaggtagctgatgaaatggttgtgtcttaggttcctgtctccaaagtatttcctccagaataatgtagaagaacaagaaggagaaaagtaaactttgtaaaagccatgtcctcagtgtgaaagacacaatatactccaacttgaaaatcgtaaaaagaggtaacacccaatccaacatggaattcctgatgttctccatctccccactaccacaaggctctgtccaccttgggttgtaggtagttgacagaaaattataggtacaagtttgcagcagaaaaagacaaaaaggaaggagaaggaccttttgacatatgggtggatggcgaaaggaagaagaatcagcaggggaaatttagtgtcctgtagacagggacaaccacaggttgggtgtggtggctcatgcctataatcccagcagtttgggaggctgaggcaggcagatggcttgagcccaggagttcgagaccagcctgggcaacatggcaaaaccctttctctacaaaaaacaaacaaatagtattgtacaaatgagtttctggtctcgttaattatactattgttatgtaagacctaatggtcgggcatgttgggttaaggccatgtgtactagctttgcaacattgctgaatatctaaaattatttcaagataaaaattaagaaaggaaagcagtggttatgcctgtttatacttgagccagagcaacgcctgactcagaatagacagtcacccattcacgttttctaacttcagattgtgcagttgtttgttggttcttgggtttttaaataatgcatgaagaaggtggaaggagcggcgccctgggattgcagtatcgtggtgttgagtcacttgcgatctttccggttcagtgactcctcagtgtgcgtggattggggccctccagagatgctctctgtctgtgtgtgtcatcgcagccctctgctgtccatgcccgacaagccagtggctttcactgctgtgtggggtgggggcgatgtttgtgtttgttttattccaacagtggcttcgtttctcttccagggcatttctctcgctcttcacaagaagtggcctctgcttcttctgattattcacactgtccattattgattactccttatcccctttctttcctctgcatgaaaggcaggtctctgccgggcgcagcggctacctgtaatcccagctactcgggaggctgaggcaggagaattgcctgaactcgggaggcggaagttgcagagaatggcctgaaccccagaggtggaggttgcagtgagccgagattgtgccactgcactccagcctgggtgacagagtgagactcccatctccaaaaacaaaaaaagaaaggcaggtcttttgtgaattgacggctaggctcacttcctggagggcagtcggctggctcaggcacagggcgggaggaaagaggcttccgcacagccacgttctcctcattcctcacctcgtagaaaagatttttggggggtggtggttaatcatgttactctaagttttcgtttcctttttactcggctcaggaatagtaagatgcctttacaggcccgtttgaatgcatttaaacttaagaatttctgtcatttttccctccctttttgtttctcttagcttattttttgagcctgcaaactttaaatttttattattctgagaatagcttatttactaacttaaatcctgttttgaaaaaggcaggttgtgaaaaagtaaaccataaatagtttatagctgtaaggagttgaagtgtcttcagaattaatatttatgtatttatttgaagctcagtttagctgttgtcattcaaagttctgcctcaagtatgcccagatcttgtcagttacacagccttcctttctctgctttctcttcttcccaattcttccagcatctcaagaggcagggttaacaattccactcccaggctgggtgaggtgtcctctccacggttccccagagcccagagaggcggagggagccccatggtccctgtcctggagaggaagacctcccccagagtccagagagagggatggagcccccatggtccctgtcctggagaggaacctccagttctcggtcagggccaagacccccaagtgggtcacagttacttgtttttcctcttgccctcctcagcctgctggctcttctgtgcaggacctcagactgccaggctcctgctctcttcctccaggcacatcttctcaccagaactccagccctgcacctcagactccctgttcattgtctcacctcagccccatctcaagtctagaaccccctttctttcttgttgacttattccgttctaactggaatcctagaagagaatgacaggatgatggtgctgtgcctctgaagggggtttgttaaaatactcagaatcagcagggcacggtggctcaagcctgtaatcccagcactttgggaggcccaggtaggtggatcatgaggccaggagttcaagaccagcctggccaagatggtgaaatcccatctttactaaaaatacaaaattagctgggcgcagtggcaggtgcctgtaattccagctactcaggagaggcaggagaatcgcttgaacccaggtggcagaggttgcagtgagccaagattgagccactgcacttcagcctgggcaacagagtgagactctgtctcaaaaaacaaacaaacagacaaaaactcagaaccatgcctagaaaatactcagggctccctgtttgttagataaattgttagatcagccaatgagtgacatattgcatcttgtatgctgcatcccaggggatttagttagtgacagaggagaaatacagctcctttgcaagtggtcctgcgtgccgaggcaaagatccgcgtataaaatcccacgtcgcacgtatgtgctgggctcgtctgtgaacaggttacatggaccctctctagacccagcagatgggctttgaaatgtggccttcgtgttcagctggcatttggttttcaccaggagacaacagcaaacacacaggcggaagaggagagggagcccgtgaggctcattgtcaatacaggggagacagccactcaggacggggcttcaaggcatgcatgggtttgacagaggtgaggggcctggcgcactggagtccaggctcatggagggaggggttggtttggcatcttctctttagcacctgccacgtgttctgcggaggccagttagtgtcagtcagcaaaacaccacctccaaatgctggcagtggagtgtctcgctttatttttttattcagatcgataactcctaggaaaagagcatcttttagagtcacctgaaactaaataaagagcagagtgcctgagttgtggaaacactggtgctgtctgggcctcatggcagaaagttgcggggccgcggctctcgttccgtcctcacactgccctgctagagtgcgtgcgtgctgtgtgcattcctcatgccgctgctgtccctggcaggtgacagttcaggggcacctcgcgctgtgggtgagttctcgagtgctgcggggagtgtagggaaggccggtggtgcggtatcgaggaccaattctgtgtgtgtggttcaacatttctagttctcttacaccttcatgaggtgtacgtctcttacaccttcatgaggtgtacgtctcttacaccttcatgaggtgtacgtctcttacaccttcatgaggtgtacgtctcttacagcttcatgaggtgtacgtctcttacaccttcatgaggtgtacgtctcttacaccttcatgaggtgtacgtctcttacaccttcatgaggtgtacgtctcttacaccttcatgaggtgtacgtctcttacaccttcttgaggttgaatttcatttgattcttaaatatttggctgaaaaattagataataaacgtagttacaatctctcctgtcatgaacactgaggaagaatgaatttgtctaaatattctctcggtgtattagaatattggtaaatgatgtggaatcttcctgtatttgatgtgatataatcttatcagttctttaaaatgatgtagcaggctgaccgttggccccccaaaagattagccacatcatattttctggaacctgtgaatattacctcatgtggtgaaagatgtgattaggtccccccccccaccccaaacaaagtctcgctctgtcatccaggctggagtacagtggtgcaatcatgggtcgctgcagcctcgacctcttgggctcaagccatcctcccacctcagcctcccaagtatctagaactacagacctgcgccaccacacccagctaattgttaaatttttttgtaaagtcaggggtctccctatgtaactcaggctggtcttgaactcctggactcaagccatttgcctgcctcagccccaaagtgctggattacaggtgtgagccactgcacccagccaggttaaggttgttgagagggagagcttatcttggattatttgagtgagccctagatgtaatcacgggtgtccttatgagtgagaagcagaggagctttgagtcagacagaagagaaggccatgtgaagactgaggcagagctgggagtgatgtggccacaggccaaggaacaccgaggcgtgcccacggccaccagaaactggaagaggccggaatggatttgccccagggcctccagagggagcgtggccctgctgacttagtgattttgcatgaatacttgagtctatagagtttgagaacaaggactttctcttacataaccacagtacatttatcaaaattaggaaatataacattgattcagtcctgtgttctaatttgtttcctttttttttcttaaaaaaaagaaaaatagcgtcttgctgtgttccccaggctggagtgcagtggtgtgatccatcatagctcactgcagccttgaactcctgggctcaagtgattctcctgcctcagcctcctgagtagctgggaccacaggcacgtaccactacacccagctaatttatttattttttgtagagatggggtttcaacatgttgtccaggccggtcttgagctcctgggaaccaagccatcctcctgccttggcctcctagactgctgggattacaggcgcgagccaagcgctcagctgatcgaattcatttcttagccagttgtttcagctccgtctgtggcagcctccgcactggcctgggagcggaccccggactacacacggctttttgatggcacttcatcctcctcagctttgctttctcagtctggccatttttgaaggatgcgggccagttcagttctaatcctcagtttgcgttttcctcctgtcttctcccgacaagagcagggcaagcatctgtggcaggagggctgcagaagtgatactggggcttcctcaggtgctgtcggaggtgctgatggcattttgtcccatgattggccatactcattttgaccttgattaagatggcgtccccacatttctccgctgcggagttgttttccctttgtaagtaataaggactctggctctgtgcctaccctgttccttgtgctggttttgcaaccatggataattcttgcccacatcagttatgatcgtgatggttgccaaatgctggttttctgattgtatgtttttcttcccttcgcccccattcattccttcattcattcctttatatcattctaaaataaattcttattttatcccatcaatcatctgctactgtcattgtttattttgatgctccagttgtccctgatttcgctgccaccctccaagctcactcctgtccatgtgttttatgtgttctcttcactgttgagcaattccttgctttcaggcacgacaaggtggagcagcctcatattctacccgcatggctcaagtcctggcatcagccacgtttccaaggagccctggttccttttctacagaatgggacttagaagccaagatgtcggctcctggcattgactccctcatcctcaacatgccgctcagttgcctggtgccacaatacacaggaagtaaattcagaattgccgtctcgtaccatcgtaaacaaactttctcacgtgaattcactatctgttcccagttattttctgcctgtggactgaggggtggagtcaggtgtagatgccatggtcagagttacttgggtgggctttgtcccctctgttccgggctgttatttgcactgtactcaagttcacgtgtttagtttgtattctgttccgttgcagggctctcttatccttgcttatttcttcttttatgagtatgtaagttattaatgtggttctgcaagtcaaaactgtataaagctagagtcatgtcatctccccaatcctgtttccaggctgccttgtgtttcattactttcaggcatatcttgtctttcttttttttttaaataaggagatacatgtttatttatttatttatttatttatttatttatttatttatttatttaatttttctggaggcatagtctcgctctgccgcccaggctggagttgcagtggtgtgatctcggctcactgcaagctcctcctcccgggttcacgccattctcctgcctcagcctcccgagtagctgggactacagacgcccaccaccacacccggctaattttttgtattttttagtagagatggggtttcaccgtgttagccaggatggtctcgatctcctgacctcgtgatccacccacctcggcctcccatagtgctgggattacaggcgtgagccactgcgcccagccatgttattttcttatatcctgctcttacatggcaagatagtatactaggtatgctcctctgcactctgctttttgccactacacagcgtgtcctggaaatcactccatgtcagtttctagggactttctcttccttttttgagagctgtatggcacttcattacgtgagtcaacatcttaacattgtaacattttgcaattacagataataccgcattgtataaccttgttcagatgtattttgtattaaggctgtatcttcaaggtaaatttatagtatcactgggtggaaaaatgtgtatgtagtttttttctagttattgtcaaattcccttcctacctcaggattgtatacccttttccattcccctcggcaacataggagagcgcctcattcggagtcgcccctcattcagggtcgcacctcattcggagtcacccctcattcagggtcgcttgttgcgttttcagtgtatgccagtgtgtgcagtctgggagatgagaaatgctctcggtgtagttttaatttgaattatttttattgtaagtgagttgaggtattgctctgtctcccaggctggagtgcagtggtgtgatcttggctcactacagcctcgacctcctgggttcaagtgaccctcccacctcagcctcctgagtagctgggactacggccgtgtaccaccatgcccagctaattaaaacatttttttttttaatgtaggaatagagtcttgatatgttaacttgaactcctggggtcaagtgatcctccatccttggcctcccaaagtgctgggattacaggtatgacccactgtgcctggctaatatttttgtatattcagggccatttccatatatatatatatatatatatatattttttttttttttttttttttttttttttgctgtgaattatctgacatgtcttttgccatttgcctcatggaatgatttatatttccacgacttttaattcctagtgacagctgctactccccacatcgtggggtgcttcctttgagcttcttcccagctgcctctggctgttgaactccctctagtcgtaagcgtaagatggacccccagagtcgtcctgggagcagcactcggaaatgcccgacaagaaccctatttctcctcatcaggtgggggcactttccagtcctcagagctcttctgacagtgttggtggcctctgcagagggcagggtcatcctgtgcctggagggacataagcatggttagaggctttctagaagggattcaggcctccgacccatctggtgctgttcatttttgagattacgtgtctctaagataaaggattgggaggatgggccatggtttatagagcactggtcactgagtcttcctgtgcccagatgtggggctcagcacttgctatgcataaactcacctgagcttcataacaactttttttttttttttttgagacagagtctcgctctgtcgcccatgctggagtgcggtggcacgatctcggctcactgcaagctccgcctcctgggttcacgccattctcctgcctcagcctcctgagtagctgggactacaggcgcccgccaccacgcctggctaatttttttatttttagtagagacggggtttcaccgtgttagccaggatgcataacacctcctttgaagtagacgcaaccattgttcccagttcacagattagaaaactgagacttaagtgcgtcactgtctagtgcagttctaccctcacgacaaagccatgtttcttccccgtgaatgaagagaaaggtaaatttacagtatttgcctttcgggactcattggtattctctcttgaaacacttcttactgcataattcagagttctcggcagcgtatccatctcttagaaagggctcttcctgggaaggctggaaagaaaggctctcttctaacgaggccggtgtctcaagcactccactaaatatgaagaggtacttgcttgatttttacaaaatcagctttgtgagaggatgagtggtccagcccctcgcccagctgtgtgagtcctgagcacctgcgcttcagagtaaggctgttggacctgggacccttccatgaaatttattttcaatcttgaatgagatttactttaatgggaggccttaaaagcagatgccatgcgagttaaaatcacacagcttattgcatctatcagttccagtcagagctgatggcaaactcttgttctttcagttcagtaaccagagagtggaatctgtctgtctgtgtcttccataaccaaaatacatcaccccacgcaatgcctcctaataactggggctttgtggtcagggtttttgcagggcaggccccttttctgcaggcaaagtgctaatggccagcgcctacactgcaggcctctggcgcattctctgccgagagttctgtccgtcccacttctcctcactgtctagtcttcttctgaccctcccagcctggttcacgtttgctcttcgttaccctcttcctgtttctttctcctgtctctcctcccaccacaccatccctcacatgcaccatggggtgctccttcagattgtcatctgatcgagccacagtcccactcagcccatgtttgtcaggactctgccactggtcacttgtccacaaggaaccactgtctttgagcttcttcctccggtgctcttagcatctgcccacactgtatctatctgtgtccaggtcttgttttctgtgtcattgtttgatgaaaggcagggactcattcggtgagtgggtctcccctgcctctgccccacaccagcacactgctctgcccttggtgggcacccgttggtgtgtgttgagctgggtgttgtacctcggtgtctgcgtggagaaatgcgaacagtgagtgccacagcacagccacggaatggttgtcatcggcttcagaaggggaatgaaaggggcagcaccgtgggtgttgatgatctccgaggctgcctgtttagagcgtcccttccctgagatggaggcgtagcttcaccgtgtagtgtttaagctttaaaacgtgaaatgcagtgaggccgacagtgagttgtaggaagctcagaaatgggatgcccgcactgccttcaattcaccctccattgtccatcgccgctggcatacccaggtcagcgcctgcaggcccctgtctcaaaagatgtggccggcttcttgtcccggtactgcctgaagcttcacctcagcaccgctagcttcacactggccacacccacctccactcagcagtctccatgctgtagcccaaagcatgtagtggcggttgagtacctgagtgggggaaataattaactgggatgcttttattgataagtagtcagatgcctgttaagtgacatttatgaacactcacgtagcactgctgcctgttagccaggcactagtcaaaggacttttgatgtattagctcatttaatcttcacagaaactagaagttagacactatcctctccactcccttcacccccagccccaaacacacacaattttatagccgaagaaacggaggcacaaagaaggtgaagactttgctaaagtcacaaaactggtataagcatgggctttgtgtgtgtccaaagttcatccctcaaccgtttctctctggatcaataattaaaaggtttatcaagaagtctgaaggtaaatggttcagtattgtcaggttctggataagtttctctgtgttcttgacttttccctcatgatgacaagaaggctgccaccactccaaacatcacagcctcacagttgtgctcaaagggagaaagaagaagggacggccgttctcctttgagcacactgtttcactggcttcctgtgggttccactggcctgacttgatgcctgggacactttaagcatctccggtgctatgcgggctgggaagaagtgagctgtagaggcagccagtgttactctctgctccatcccttttttgttaattttgcggttactgttatttaaactagatgtatctctagggcagtggcaggaatcgactccaaggacactgaccagcttggggctgctgcctggcccaggccggcgcatgttggaacacagactctctgcccttccaccccaagcctggtgggcgagtgagtctgcccagagggagtgcctttttctgctttacacaaggcacctcaaggggtagaggtggcctctcctgcagaacggcagctgccctgttgccgttctgataaattgcaagataaaactgaagtgcaaggaaggggcatttttgattttggatatgactttgcctaaaaatggcaccttaaggtgttttaaacatttatcaaacggtttcatatgtatggagtatgtctgtgcagcattcttaaagtgacaggactaccttatgaagtcagtaaatcctttcatctccccagacagccagaagctagtcagcagatgaacacattcacttgtatgttccccttggcaacattattcctagagaggttgcatctgcatcttggagtccgcatgataaatcatttatgtactcacagaaaccatgcactcccccgtgggaagagttctaggtgtagcaggggcggaggacgccacctgctccctgacatccgtctttccgaagccatcgctggagccctctgctgagtgtgggcagtgaggcctcgtcttacgcatgtggtcagaggagataatgtggctagaagtgctttgtaagcgccaaggattgctgttatgaggaatttactagatttcaggctttcatcagatagttagcgaggaagcgcaaaagcacagcatggtctccatgtttgctgacctgcagcgaaaagtcagaaagctaattggaggccattcataggctgattctaccttacaccatcattatactttttgtctataagactggagaagatctttctgagacatatcactatcagtgttttacgcgtatgaaacatatttttctttccttctttatgttcatttttaaaatttttgatcagtgccctcaagcattctcctattcaatagaaaacatatttttctaggtatgataatctttcagatttttggtatgtgtacctttgctaaaaacacatttaatatttctacctgtctggacaccttttaaaaatgtctggctgcaccttggagaaacgcttcatgcaagcagattctaattaaagtaggaaactttactttaccattaagttatatgtaaaagcattctaggggagagtcttttaatcattgaaacattttcaaacgtgtttgctcatttgcttctttatttgtttttatggcttattcatttgtttatttttaaactttttattatgaaaaatttcaacatatacccatcatctatcttcagtcattttcagctgccagttccagtctcctttcatctgtgcccccacccagtccccccttcccactcccctggctgattaggaagcaaatcccagacttcatgtaatttcacctgtcaatatttctgaaagaaatatttactttctctaaagataagtatgcttctaaacacacacacacacatacacacacacacaatgtttgtttgaatcaggatgcaagtgagatgaatgtattgtgagttacttcatctattctgttaatccatgtaattaatccaaaagtcagtccctcaccccagcactctctgtgcacctgtctgcctgtctctttctgcagttgattggttgaagaaactggatcatgtagcctgtagaatttatcgtggtctcgatctcgtcagtggcttctccccccttgccctgggtgagccacactcacctctgctccttggatttcctctcggtggtggacacagccgggctcccctagattctggttcagtcagggaatgtttcatgtgtggtgctgtgtccttactttaggatatctgatagtccctctgtgatattagcagctattgatgatcattgtctggatctatttattagagattatgaaaagatggtgttattgtttcattcctttttttgcaacaggggatctcacttggccacccaggctggagtgcagtggcgcaaacatggctcactggagcctcaaattctcgggcccaagtgatcctcccacctgagacttccaagtagctgggaccacaggcacatgacactatgccttgctaatttttaaatgtcttgtagaaacagggttttgctatgttgcccagactggtttttaattcctggcctcaagcaatcttcctgcctcagcttcccaaagtgctggggttacagatacgagccactgtgcttagctgtccttatttgttaactggagtatctctatataaagaaaccctctcatcaattatttggatagctcaaggtacagtcatagaggaaagccagcatcaatacttactttcctttattaaccagttttcaaaatcgtgtgtgggcttctctcaaaggtgactagtaaggggtgtgtgggtgtgatatgtgtgtgtgcatgtcgtgtgtgtgtgcatgcacgtgtgtgcatgcataggtatgtgtgtggtgtggtgtgtgtggccaccctgttgaaggcactacctactgtattcgtttctcactgcatctctcaaaggtgactagtgtgggggtgtgtgtggatgtgagtgatgtgtgtgtgtgcacgcatgtcagtgtgtgcgcataggtgtgtgtggtgtggcgtgtgtggccaccctattgaatgcatgacttactctattcgttcttcaccgatgtccacgtcgttccatctttgtgttggcccctgagccttgtgatgcagttctcgcggtcctcaattgcttcattttgatatggtatgacaagccagcatgttctgtgccattttgtacttcttctaccctaggcctgaaatcagccacgtgtctgtctccagggagtcttggtttccttccatgggaagtggtatggagagcttaatctgggctccagggctgctcattgacccttgttcagccccctttctctatgggtgtttcaaagataaaatacgaaggcgctcttacacatccaggttcaggtctgcaaggtctgcttactctcatgggtcctacagctgtatctgcttctttccacatggagtgctcagattgttcatgaacaccaacgtaattacccattctcttatcctgcaccacacctggcagtttcagaaagcaacaccagcactgccactgacgcggttactgagagccgctgccgaggcatagccgctgctgaggcactcgcccttccttctcaggttaggcacagatgtcgagtgacattaccctgtatttttatttatttatttttgagacaggctctcactgtggcccaggctggagtacagtagcagaatcatagttcactgcagcctcaacctcctgggctcaagccatcctcccacctcagcctctcaagtagccaagactataggtgcacgccaccatgtctggctacgttatgttatgttatgttatgttatgttatgttatgttatgttatgttatgttatttttttgagatggagtcttactctgttatccaggctggagcgcagtggcatgatctcggctcaccgcaacctccacctcccaggttcaagcgattctcctgcctcagcctcccaagtagctgggattacaggcacatgccaccatgcccagctaattttgtattttcagtagagatggggtttctccatgttggtcaggctggtcttgaactcctgacctcaggtgatccacctgccttggcctcccaaagtgctaggattacaggcgtgagccaccgtgcctggcctaatttatttatttatatttttagtagtgatgaagtcttcctatgttgcccaggctggtcttgaactcctggcctcaagtgatcctcctgcctcagcctcccaaagtgttaggattataggcatgagccactgtgcctggctggattactttttaaaaaaattaattttgctttgtagttatgtaaaatatttcatgagtccaaagttaaatacacaaaatgaagtttattgaaaggagcctggctgctcttcctgtcctggtgagcctattttatcttttcttctgtaggtcaccactgaaatgttttaataatatgtgtaccacatgtgatgacacgtatgcgtaaccttgggtacatttatatacgcacacacgcacacagtgttttctctttagggaagtgctgtatgttgtacatggtttcttctaccttgcttcttgttgctgtattagactggaatccacgtgtcctcattggaatcaaagcttcattgtttcctctaaagcagagtttctccagcttggcccgattggcatttggatcagctaattcatgattgtggtggtcgtgtgctcatgtgctgtgcggacagtcacaggatgtgtagcaggtccccaggccattgccatcagatgccagcagggcccacttctcccagcagtgccgaccgagcctgtctgcagacaacaccagtgcccccgagggcagagttgctcccagcggagatggtgtttctcgggttcattggggggattctgagcacccatttcagaagtggatttggccccatctggaagcaatagcttttctttttggactttgaataataaaccagctattctagttcttgtctgcctcttctgcaaattaaggaaggaaggaagaattgttactgaataatacataaaggaaagagtcgatgattttacaaatttcacgtaactctgcccttactgggcagacacgtgttgagaacattacgagttactgtgaccttgtagtccctttgggttcggtgtacgcaatttcctactctcagcatctgccagcccagactctggcagacttatgccagccctgggtgctgtagggtcagccacccccttccacgcagggtgggcgtccagatggtgctgtgggaaacagcgttttgccaggggccagagagctgactcagatagtgacctggaaaacagactgtggatcaggtgggcacgggcctggaacagggtccctgaaacacccagcaagaggctggggaatgtctggagagcccggcatggtccggagcgtccacgcagccagcagctcacatcctcttgctcctggcggccgatgctctgcgcagaaacgggcttggtctgaacggagagggacattgtgaacttgaaatgaaatctgacaagaaattagaaatttcttcagaaagtaaagagcgctgtcaagaatgcgagctgaagatttgcgtttacagctgtagagcaaatacaggcggctctgacatctcagcttttgtttgccactgctgcagcctcaggtgcctcatctggggcttcattcagagtgggtggggaggcgacaggtcgaggcagttgccccgtgctcacgaatccctgacacagctggtgacctctccaggtgacctcttcaagcctggtcccaggggcaggcatgcccgggcatggccctcgcagatggctttgctggcctggtctggcaaccgttgaataaatactgatttcccacccaggtgaggcgcatggtagatgtttgttctgtgcattgcgttggtcggcctccacagtcgcacaatctctcagtggagtgagagtgtcttccatatgtggggccgtggtgctgaaggcttgtgcgttgagtgcctcctttcccgtgaatgtgttggttctggtgaccagggtggagcctccctgcgccccttccttccatccagcatcaggttcccagttctctgcctgccaggcaggcgtgcacatatggagtgtctgggaacctgcagctgttgatcacggctggtggtagctccgcacttaagtaaggaggagtgattttcccgaggagatgtggtattggtcggagttgctgggaaatcagcagcactgagtgatcaggttgtcgtgagctcctgcctccatccaccccattctggcggttcctggcttcactgcctcttgaagacagcctctctggcactcatgggcatgttggccttctcgaggggaaggggttgagtaactcatggcctgttagtgtgtgccagagactcagcaccacgggcagacacagtgccacgggcagctatatccaaggagggtgagggtgctccccagaagcctctgggcctccgtgggtgtcatcagggtagtgagcaggaagcctgggggctgagctgggctgcctggctttgacatgggcctgtgcggggctggctgtgtggccccgtgagggttactgaacctctctgtgcccagcctcctgtttgtgaggcaggagcgatggcagtgcccactgcatggtggtaagagtgaggcgggtagaatgcatgtgcccaagacagaggctgccccgacccgtgctgtgcgggtcactcacccccacattgtctgccacgggggcccgagcatttccacacgagactttcacatcagccacccgggcagggcccgcgttagtttagttgtttgtggaggagaaaattgaggtttggttttgttcatgacgttgccaggtcgaatggctggtgaatcattgatttggggctgagacttaagtttcccatctctgggcgggacctgtgctctctccctgtaacagtggcctctgttacagaggggcaggtgggtggctcacgtgtgggctcacctgcgtcacttctctccagctcacctccactgcgagagtgcctggggatgcctgccagccacccagagccagcgtcttcccaagcagctgttttacaggaaacaaagcaggatgaccttgggcttcctagtctctgcacgttaccccgaattccagaataatcgtgagaaggagccagtggagtggtgtgacttttgtatttatagacttcttccaaaggtcacctcttttatttctgaaaaacaagtcgcttgaggcccatctttacagagtgacaggagctcaggatgcagaggcaccaaggccagggaggagcgttgggggtggctggagctggtgggccaagggccgcagaccacttttgccctgcatggcctcgtggctgccttttctacctgcgtgagctggctttgatctaccccggacccatctttctgtgaagagtttgcagaggatgctggttacatcttagatggaaattggccgtgtctctgctgtttctgagtgtgcgactctcagagccaaggtggcatctggcgactggccttgttcttgtgagtccctgtagggcaggatagatttttccggcagggctgcagcctggagttcaggcttcctctcccttttaaatttcaaagactcagggttccatttaaacagacaagataagtggcagctttgttttgttttgttttttcattaagagattttggagggggaggaaaccagccttacagtgatagcatcaggaaaagattacacagaatggcatcttattatgaaatattgaaaacatttaaagagcaaataaaatatgcaaatagagtgggacagaatttgtactgcacagcctcttgccctacatctttcccaataaaaatttaactctgaggtccatgttgggacaaaaaaaatgatactgggatagtggagctcggctttcgttagttcaaagcgagcagcatattaatccaagtaagcagaattcccatgtagattcattccacagccttttcttgggtgacgactctgtgcccagaagcaaggggctgactgggacctgagaggcctcttcttagtggccatggcctcccggggcaaggccggctggtgcgtcagagcctggatctctgcagtgggcgcagaagggacacaggaattttctcttggcctctttgctggacttgcagcagggatgccgccgaactcagccgtttgcaggcgggagcacgtgagtgagcgagtgtgggatccagccagcccccccaagcaccaatacaggagcaaactccatgcggggcccacagccagaccaggtgtgtcaccttgaggggaacacggtggcacccaggcaagggtgcccatgaccctgaagccccagagtgggtgttagtgtgctcattagctcttttagttcttccatccacagtccaacagatggtggcatgttagcagctccgtcgccccctggccccatcacgtagggtggctgccctctgccagcaggagcaaagggctagtgtgacagtctttctggtaccagcacttggtgggtcctgagctcttgtccagcatccaagcagaatgcagatgtgcctacagtcagagagtgagcaaggtgaggggttttactgagtgatgaaagagctttctgcagagaggggacatgggggcggtccccccacccgaaggtgggaaaatccctccagtgtgtcttagtctggggcttttgtgggctcagaataggggaggggcaggctgtaggtagtattggaaaaggcaacatttgattggttaaaaggcattattcagaaagaatcaattgggaaagggtgggcaaacgggaataggagttttgctctgggtcttgggttttatccaggacctgccgtctggtctttcagccttcaggctgttatttggcttggaggtaggtttcaccagggacctgcccctgtctgcctaggcatttgactacctcccatcggtatcagaagcaccttgtgagccccagggagctggtgaggaccttgtaagggaggaggagggcggcgtgataggtgcaggtggcggcgtgataggtgcaggtggcaccgtgcacagccacgtcagggacttgggaacgtctgggccaaggagccaccttgtgcagaggcatggagtcatgagagattagccacggtgggaacgtggtgaggacactgggctgagcagagggctcgcaggtggtgctgggcagggagcctgttgacccacccacagagggtttgtctcaggggccggtggcctgactgctgtgcgttaaggaggaaggctctgacagaatggggggacttggagaggggtcattttggaggcctgaaggtggttggggtgtttgactcccatgaaggcagaggtggtacagcgaagtcagagggacacattcctgtgacccactgggcaccagggagatggcaggagcaggagctgagggtagtggtgaggtttctgctggcagagtttggtggttgagtttctgctggctgatttggtggggccagcgagtagacaaggatcccagacgggtgggtgcggggcaaggtggggaatttgaccagatttctcttgaaggtgccctatggggaaacggtgttgtgaaagtaggagggtgaggaacggaggcgactgagggtccacagaggaggatgggccagaggcagaggtgacaggccaggtaggccgagtgagcaggggagccacgtgaggccagtgcgggcgcaccaggcactgggccccatgcagaggggctgccgccccacccccacccaggcctcactgactcctgtgggagccatctaggtacagcaaccacgtggaggatagcgtgaaaagtgacgggacggagcaaagaaagacaccagctcctcgtttgcagaggtttctgcaccgttgtcaccagcatgtggtcatggcctgctccccgggggccattccagccattgatccacattgtcctccagccaaaggaaacaaagcgggaagtggaaagagctggagttacgtgggggcaccttccatcctaggccggcagctggtcaacctcctcagcctcgtcaccgtttaacatcctcccttttgttcttttctccttaatctttatgtttggaaagatttctatagacaaatgtgccgctgcttctccatagccttatctggaacaaaggaaatgtcttttattaccattcatgcaggtataatccgtgaaagacaagcctgttctgccagtcaccaagtcagtccttttccttctgtcttgctcatggaaggctgtcccggccctcacctgactagtggtgcagctcttcagggggtagtgcccatccaattcctggggaaacccaggcgagcctgctggccaggaagcgccagcttgtgtctgattgctaggttaccctgggtgcttcctggatgttcaggcgcccgtgattcccccagcatctgcctcgagcttatgtgcatggagcagcagatccctttgtctgggcagttagattgtctgctaaggaaagtgggtgttggagcaaaagccttgcttcactgctgtactccaacccatcaaaatggaattgtttaaaatgccctcaaaataaaaatagagaccccaagctcttgataaaacagctttctctggagaagctcatcgggctgtgtaaactccaataggaagtatttattcatcatttgtatgtgcacaaatatttatttaatgtcaactgtgaaggctgatgagtaaatcagcaggtagagtccagtaccctggtgcagtgatggggagctagaggtgctgtgcacagtaccctggtgcagtgatggggagctagaggtgctatgcacagtaccctggtgcagtgatggggagctagaggtgctatgcacagtgccctggtgcagtgatggggagcaagaggtgctatgcacggtaccctggtgcagtgatggggagctagaggtgctgtgcacggtaccctggtgcagtgatggggagctagaggtgctgtgcacggtgccctggtgcagtgatggggagctagaggtgctgtgcacagtaccctggtgcagtgatggggagctagaggtgctgtgcacggtaccctggtgcagtgatggggagctagaggtgctgtgcacggtgccctggtgcagtgatggggagctagaggtgctgtgcacggtgccctggtgcagtgatggggagctagaggtgctgtgcacggtgccctggtgcagtgatggggagcaagaggtgctgtgcacggtaccctggtgcagtgatggggagctagaggtgctgtgcacggtaccctggtacagtgatggggagctagaggtgctacgcacagtaccctggtgcagtgatggggagctagaggtgctatgcagcctttggcatggcttcctatccagtgtctggaagagcatccaagaaggatgctttcaacatgataaaagacaagggacatttaacatgatacttgaagaatgaatagaaaatgaccaggcaagacttggaataggacatggagaaaaggtaggaagaaggttctgggcagaaggctggaaagtaggttagaacataatgaggcaaaaggcttaaaagatcctttcttgtggctgaagtgtagactctcagagattatgtctagtgatcaggctggagatcttgcagggactcgtaggtctttctaaagagttttcaaagttagtgggaagacatcaaaggtttctaagcgggagaaggacctattgagttttggagaatggatttggagtgaaacaaggctggaggataagttgggaagttactccaatgatctaagaaatagataagtggtggtggtgatggtggtagtggtggtgatggtggtggtggtgatggtgatggtggtggttatgatggtggtggtggtgatggtggtggtggtggtggtggtgatgatggtggtggtgatggtagagatgatggtgatggtgatggtggtggtggtggtggtgatgatgatggtggtggtgatggtagagatgatggtgatggtgatgatggaagtggtggtgatggtgatgatggtgatggtggtggtggtggcggcgatgatggtggtggtgatggtagagatgatggtgatggtgatgatggaggtggtggtgatggtgatggtggtggtgatggtggtggtggtggtggtgatgatggtggtggtggtggtggtgatgatggtgatggtgatggtagagatgatgatggtggtggtggtgatgatgatggtggtgatggtgatggtggtggtggtggtgatggtagagatgatggtggtggtagtggtggtttggtagtggcttgacctgggtattgatagcacggatagaaagaggtggatggactcagtcaggattgaagaggtagactcaacaggatgcaatgattgatgacataaaaatggaaagggtgaaagacaagaaggtgtcaagggtgattcttgggtttctgttgtccagctgggtgattctcaggtttctgttgtccaaatggttagtgaccccatccatatggattgaggagagaggggagcaagcttaggagggaagacacagaagatgtgcactggacaattcctctctgctgaaaggcctcagacacactgatggattgcttcacatctgggaacaaatgctgtgaagtctctgtgtcctcagcggctccacctggttgcactagggtggaatcatgggaaagggcacaggttatatattcttgccatttattctcacggagaccataatgctcattccatatcaaccgaaaggtagcatttgccatcactctttttggcttttgttttgtttctctgtattttacttgtttttcatcctaacacccttaagggtgagggtaaacaagggctataggaggcgaggccttccagggaaatgccgggcagggaagaaggtcaggtccgcctaaaggtccctcctaccaacatttccctggaaatctttgcatcctacttgagaaggagaggggtagggtgaaactttcactagaccccagatggggccagaactggcctgagtcctgaaatgacatttgttcctccaggacagttctgagagtgttgcaggcatttcggtttgttggatctaaacttgacctgctattcattgctataggatgggaggatggcagcgatatcacttgtactcacagacccagcctagtacgacgccagtgtctttgttagaaactctacagatgtctatgtccagcctgccccagcggcacagggctacccctggtgggattttgtcaaaggggaagacccaccaagtagagcccctgagcccctcctcttcccaggtggccgtctctccttgatccacaccagcggcagtttgtgcagcttcaccagagcttctagcgggaccatgccgccacgagggccactgggagcagagtccctcccatgctcagggctctccagggtctgaagtctgcacttgtatgagaaggagctccaataccaataaaagtctacgtggaaaatgcagaatctgattgcagtagcatttcttaggccttattagcatataaatttaccaggtgtcattttaggacaagagcccgtcactgagaaggaaatgaaatttggagctgcattttccttcattaaaccaagggcccatttttgttttgttttgttttttgttttgttttcttttcttcggttattcattcttttattatcttctgctgtcacatcctccaaaactcctgtgcatatattttcttgcaccttgagatttggcatttcaggaaaaatgcctagcacaataggctgtagtttagagacttgctttgtcattttatatgtccagcagaaattgtcgtaactcccccggatgatcagatgctcccgtgcctctcctgtctctcagaccacacagctattatccctggcattctagttgtgagacaaaaccttaacacaatgtggtgacatttaatttagtgtttctcatttcaaagcccttaaaaatattaattaattcccatgaagccccaggaggcgtattattaatatctgtggcgcctttcatgctagtccattaatgtgccttctctacgcaataggtaagaaaatgaagctaaatccgtttttcgcagccccatgggataagaccttcacagagccagggtcagaaatgatgaatccttaattttattggtgtccctgaataatctaccccgtggccttctgtgtggcgtggaagaacagcactcctgttcaggagcaatctcaggagacagcgaatgattttcctgtggagctgtgacttcagcaatcctagttcgatagctgtgttgaggagagtagaattgagaaaaactgccgcagcagtaatgtaataagtgagatggagcaggaggcacttgacaatttcactagaaaatctcccagcgatctgtgggccctgcagtgaacccagcccctgcagatcgatgggcccgtgctccagggagacagatgtggagatcagcaccgtggcttgttcttattttggggtgccttatctttccgtgcctttgttcttcaccactatgcatgggggatttctgtagccttagcaaccagaaagcagggtggatctgtggaattagactccgaaatctcgagtttagttgacagcgctttttccttccttctgattgcctcgccgtctggcaagctctgcatgtgttcttttctcacctgtatctgcagcccatgactccggaagtctttctgactctgaaaaacatatcctgtgttcactaaggggaagtggttttaatgtgcatgaaaagaggctggcaggcgctcaccccacctggaccctagaccctggagaaggggtgggaagttagcttcagtggacgttcctgataaacgtgagctcaggtggctcacttcccctggcctgactgcagacttgagccaggaacacccattccgccttgtgtgtgagacccaggaggatcaaggagatatcctttagcatccattaaaaaaaaagttttttttgagtcctacctctccatttttgctcttccctacttgagctgtcttaaagcatccctggaggtaggaaaatgcatagaccctccttcccagggccccagtactgccggaggagcctcggtgatggctgcacctctgccctggggcctggagctgggctaacgctttcttggaaaacctctaattgtttctaccaagttagccaggacactttttaaaaagcactttcattaaaaatgcataggtatttgttttaatttacataacggcccagaccaaaatgggatgtggcctgctgcttagactggccattatcacgcctctgattcagagaaaaacctaaatttcatgtttatgcaggtcttatagctgatgcgtttggtttgaaggagcaggtgaactaggtcctctccaggacttggtgcttttttgttgggtgtggagagacatgggcgagatggggctgttgctgctgcgctgatttgaagccatctctccagactgaacccgtcctacgtgtccgccattctttctacctatccacctgaagacggaatgtctagctacctctacttcagacttattttctaatttagaatgtacttacttgagtggatgtggttttggagggcctgtagccaaggtcgtgacagctgaataaaatgtttccttctttgcccccagaactgcgctttcatttatcagctgcccttggtgtgttgtatgggatcagccaacattcaggtatttagaacattaagactcagtggcctggttctgtctcaccaagaacacaaataaacagttgatgaatccatcacatcagtgatgaatccagaatgtgtccatcattttcgtaagtcttagtatgcagagaatctcagatagcaaagcagaaaggatgatgtcacagacgccttgggtacccagcacctggatgcagctgtttgtacacacatactttctgatattatgttgacagtgacttacaccacttcaacctcaggcaggattctatcagtttctttactacaaattgatttgtttctttaataattattgtaattactgtcagtaaaaatctgagtatgactcagcaattagttgctggtaactgagtgtgttgtaatgctggggaaaggatataaaacttgtattttgaacagaaaggcacacatgtgggtgagcagtgtttaccaccacagaatttaccgtctacacagaattgagatagctgcacatgaatgtatagtgagcagtgtaagttaattcagagaaagaaaaaattatttcctgctgaaagggttcaagaaggaattttgtaggagagctgggcattgaacaggctcctccagaacatgtgggtcagattggccaccgcatggctggggtcccccatgggccagtgatgcccacctatgggagcaggtgacacgctgcctcccaggccacgcatcgacacccctcctgtcacgctccgtgcttctctgagcacttcctccttccctgtggccctgggctccctgtgggccagccctgtcctggcagagccccctgtgcgtgtcaacgcacatccttcatagatgaaaatggacttgaagatcccgcgttatcagttggttagctctctctcaagtctccttcgtgactctgctttatttttcgagcagcattctggttctgagcgaggagacactgagaggggagaccactctgtggctctaaccccgcctcagaccagggctccgcactgtcctgcagtggcacagggttgctagccttggattagcttttggttctctaatgggctttgcttgcaggtacaaaaatttgggggaacctggaaaaactcttaaatctcctcatctgaaagatattcatacatctactgatgacttccaaagtacaaggtctagaataccaagaggttttatgttgtcataaattagagttttaatgtatataattaggtgaaaccaaatgtgtatcatatacaacagagtaaccgtgttgcaggaattgggcctcgttttcctgttgttttcctcacatctaattctttttctctggaaatgccagggaacctttctttattttctttatttttatttttcagtagagacgagggatctgactatgttgcccaggctggtcttgaactcctggcctcaagtggtccttccaccgtggcctccgaaatgctgggattccaggtgtgagcccccgtgtccggcaggggaacctttcttaagcatgaatggtgtgccctcctcagggtgtgtcctctctgcttcctttctcagtcacatcagcaggtgcttcgtgtgcatctgtgtgcccagcctgggcacagcgggagcccaggccttccttcaaacgcagcctcccctgcacgttccaaacacttactggcatttttcttcaagtgatgatcatggcattggccttacttattttagttgtttttaaaagaaagttttaaaagtttatcaaagtgatgaacatacacatcactttttaaaaacataatccccacccagaggcaaacccttttagctatttgttctagtggcatatgttggtgctgctttgcactgactcatcaactcagggcatcttccctgactgcctggtgtggccccagcactttcacacccgttgttcccctccccaaccccagaaggtcgtagatttactctgtcggttcttctttgttgggagttcaccatgaaaagtactttgcaggaaaagagcaatgatagaactggagtagctcctcgcatgacccacctgtgcccgttttccagcatcctgccacccagccaggtctgtctcctccttggcccgttctcctcactcaggttctctggaagttggcacagttttactaaaataaaatcagcattcatagcattaggactatgtaaacactgttctcaagcaagccaagtcatgtgtacttgggtctgattctggactttgtgtgtgagttccctgggctgctggtctccgtgcccccagcctcgctgtcttaatgagaggccctaggggagcctgcagtgtctggcaaggccaggttgccctcagggctttctgctgccatgattttctggcccttcgtccctgtttgtttttccctgtgaccttcagtagcagcttagctccttggggtatttactgggaatgcattgaatatgtgaattaaacgagcgagagctgacatcttaagaatgttgactcagcccacccaagcagggagcatcttcccatttgttcacgtcttctgtgttttccaggagagctttgaaaatcttccatgtctgtgttttgcacatttcatgttaaacttattcctatgcattcagtctgctctgtggctttcgagatggggttttctttgccatgatgttcctttgtttattatttgtgtatatcaaggctattgattgttctctgtcagttttagattctgctcattcagggttaagggcccaggcaggaggcggagggaggagctttcagcagggcgattccttactcggtctcttcactcttctgccattgctgccatgtgtacattgcaggctccttcatttgagcaaattctctcttccatgctccagatgttttcagaaggaccgcgtacttctgagaaacacttggtaccccagtggcagctgcgtttgccttggtgttgccatgtgacaggcattacttgtttatctcattgttgttcctagtagttctcaatgtttgttgaatgaatatttataaccatcatgtgtggcagttcttatgtagtgttttgatttgtttttttgagaccatctcactctgtcactcaggctggagtacagtgttgtgatcatggttcactgcaacctcaacctcctgggcttaagtgatccttccacctcagctgggactacaggtgtgtgccaccacacctggctaattttttttttttttaattgtagagatggggtctcattctgctgcccaggctgatcttgagctcccgggctcaaccagttctcccaccttggcctcctaagctgctgggattttcggcatgagccagggtgcctggcattacctggttttatagatggagaaactcagagccatgtgtccaggaccacacagctattaactgcaaacccagaggaaagggtaggggatgagttccaagcattccctggagtccgtggtaaatttcttcatttcttctcctgcaacaggcccggtacaagcagagccttgacccaactgtggatgaagtcaagaagctctgcacgtccttacgtcgcaacgccaaggaggagcgagtcctctttcactacaatggccacggggtgccccggcccacagtcaacggggaggtctgggtcttcaacaaggtgggtgtgccttccagcttccttcccgtttctgccaaaagccatgccaattgcggtggtcggagcaggtcctgcccatccgtagcttctgttaagccattgatgtttactgtgtttcaacaaacccaaatgccataactgaacggaccaggtagtcaggcacaaggaggggctgtttctgtggcagaacgtgttcatggaatgactgccttgaagtgtggtgcgtgtggtttatgttccctctgtaagaccagcagttgtttgtaattctccgaggacagacctcgagagtgtctgccttctagtttgaaaaaattgcacaatttctcaatttcgttagaatctttctttaagcatcggtgattttcttagaaaataaagtgttttatatattctaaagggctaattccaagctgccctgcaggtgcaggctctgggcttccctcctcaaggtcagaatcaccagccttttgcaattccgttgcccaggaccagatgaagtgcttgctccccttctgtagctgttgctgtgggtggtgggtgctgactgtcatccccatcctccagggtgtggtgggtgctgactgttgtccccaccctccagggtgtggtgggtgctgactgtctcctcatcctccagggtgtggtgggtgctgactgttgtccccaccctccagggtgtggtgggtgctgactgtctccccatcctccagggtgggaaccttggtctgtctcagagcagccagctatgggtctcactgcgctctgcgtgatgcatgaaaagcagttcttggagggtgcggtggccccatatgtgcctgagcgtgtctatgagggcactgatttggaatccagcaaatccgagtcccagtttcggttgtgctgtcagcctcctgggcttctgcttccttagtgtggacaccgcctcctgccatcatagtgaggactctgactccgtttcttcacacactgaactctcggttcccgcctaccgtcccgggttcgcagctagcattcggcacaggtggtgaagcagtgtgggcccagagcagagacctcgaggaaggcttctgaccctggacactgaggagtagccagcctcggaagttagaaaggtatccacccagctcctcccgcagggcacagggcagtgccatctctccccgtgtgtatctggataccagcttgattttaattcctttcgttaaatattgagtaaattcaaaacgatcgttgtgaaggaagtaggatttacagaagcaggatgtaatgaaccaccaggcgtgcaccacaggcccctggcgtgtctttctcagctgcagtctctcctttccctgccctcccctgtggcgcctggcacagtgaatttgaatttgtccttccctggctctcctctgtggagcccccggtgtgctggctctcaggcacggcgaatccgggagatcgctgctgatacgctgggcggacgctggcgcgctcttccgcagtgcgctttgctcacttggtcggaggctctgcagattcatgccaccgaccccaggggcctgcagccctgcctcttcccacattcgctgtcccctgccgggaccccgcccttctcagtgccttccctgcagatgggcattgggctggttcccatcttgtttctgctgtaaaccgcgtgagtgtttcagctgcccacctttctctccagcactgggtgttgtcacaggttttttttaatgatagactgtggtgtgctctgattttctctgataaccattaagatcgcgcaccctgtgtccgcccgccggctccctgctgctcaaagcgcctatctgctatccacttctctctgcagtgggttgccttttcctatcggtttgagggaattctttgtattccagacagtaatgatttttatgaattgtgtctctcttctcagaatttatgatgtgattttttttcttcatcttcttacactcctgataacttacaaaacttttttttttttttgaaacagggtctctctctgtcacccaggctggagtacagtggcatgatcatggctcactgcaaactctgccttctgggctgaagcattcctcccacctcagcctcccaagtaggtgggactacaggtgtgcaccaccacacctggctaagttttgtatttttgctaatttttgtattttttgtagagccagggtcttgccatgttgcctaggctggtcttgaactcctgagtccaaataatcctcctgcctcagcctcccaaagtgctgggattacagcgtgagccactgcgccccgctcccagttgtgctttttatttgtccttcttgtcttggtgtgctggccgatgccttcagtggagtgaagtggggactgggtggggagcggggagggaggcatctttgtttctcttgtcctcgcagagggagagtttctgtgttcagtgtatgatgtttgccccaggctttttgtaaaacaaaaacaatcaccattatcgaattaagaaagtacaattcttaatttggttttttaaaaaaattgtgactagatgttgatttgcctcccttggttatttgtatgtgtgtgtgtgtgtgtgtgtgtgtgtgtgtgtgtgtgtgttaaagtggtcacagtacttttctcccttaggctggtgctacgttgaatgatactgtatgaccatctcctgttatacacacctttctttttggattaacctgtgttatgatgaatgatctgtttcatgcatggcttattcagtttgcagccattttgtttcatatattaaatctgtgttcgtgagtgagattggacagggattcttctttgtcttgctgtccttgcctaggcggagtaatcaataactgtggccttagaaaataagctgaggaatgttccttctttgtatatatacttgaatagtttttgtgatgtttgaagtatttgttgtctgaatgttgtggaacttacaaagaaagctctctgggtggtattttgtttgtggagagtttttgacttactgatctagcttctttcatggttaaagggtttttctgttagctttgccaactgacttttgcaggaccttgtccatttctactaagcttcccgatgtgttgacataaactggctcacaatacccctttagaaactcaccagtatcgggggtatctgtgagtgaggtgccttcctttgctcttggtgctgggtatatgtgccttctctcttttcttgttgattattcctgtgaggagtttatgtaccttttatcagtcttttcaaagacccagcttttaccattgttgaccctccagaggatggaaggaacagtaggatgaatacctttatactgttcccctgttgccaatttgacactttttttcttgtcccctgaaccatttgaaagatgcagacatcctgacactaagaacgaggatggctttctgtatcaccacattaccgtcaaattgctcaagaaatggaacatcagttctgtgtcatttactatagagtccatgtttgtgttttcccaagtgtttgcaaaatgtgcactaaattagtaggcatttttttacttgttgattttgttgtggacccagaatctaattaaggtccatgcattgcatctgttccttatgcgtttttagttcctcttgcctttcatgttatgacattgactttttaaatgactttttaaaatttaaaaattttgtcttcttttgggaagttaacatatagttatacatcagtcttttttttttttttttgaggttaagtctccctctgtcgccaaggctggagtaacagtggcgtgatcttggctcactgcagcgtccgcctcctgggttcaagcaattcttctgcctcagtctcctgagtagctgggattacaggcgcccgccgccacgcccggctaatatttgtattttcagtagagacggggtttcaccatgttggccaggctggtctcctactcctgacctcaagtgatctgcctgccttggcctcccaaagtgctgggattacaggcgtgagccaccgtgcccagcagtcttttttaaaataatagacatcattttttttaagagcagttttaattttacagaaaaattgagcaagtttattgagttatatacttccttcccctcattttcctctattgttaatatcttgctttggtttgttatgttttttacaattggtaaactgataatgatgtgttataattaatgatgtccatatttacactagggctcactcctagtgatgtacatgctgcagattttgctgaatgtgtgatttcctgcaaccaccgttaggttgccacacagagtagtggtgtccttcaagtcctctgtgcgccccctcatcttctctcccctagcatttggtcttttccagaatgtcctatagttggactcatatagtatgtagccttttcagacaggcttctctgactcagtaatatacgcttaagactcctccgtgtctttttgtggcttgatagctcattttttacaattactgagcaatactctactgtgtgaatgcaacactgcttctttatccattttcctattcaagggcattttggatactctgaacttctgacaattaggaataaagctattattaacgtgtgcaaatttttgtatggatataagctttccattcatttgggtgaatacctgggaatgggtttggtggatgattcggttagagtatgcttagctttataaggaactgtgaagctgtcttccaacatgtctacgccgttttgcattcctgccagcactgaacgagagtatctgttgctccacatgctcatcagcatttgatgttatcagtgtttggattttagccattctggtgggtatgtagtaggatcttattgttatttcattttcaatttcgtaatgatgtgaaattgggcgtctttgcatgttcttatttgccgtgttatatcttctttgatgaggtatctcttcaggttttttgcccattttaagaatcaggttgtttttcttgttgctgagttttaagagttctttccatatttcagatgccagttttttgtttttgtttttgttttgagatggggtttcgctcttgttgcccaggctagagtacaatggcgtgatcttggctcactgcaacctctgcctcctgggttcaagtgattctcctgcctcaacccccgaagtagcagggattacaggcacccgcctccacgcccggctaattttgtattttttttagtacaggctgatctcaacttctgacctcaagtgatccacctgcctcggcctcccaaagtgctgggatcataggcatgagccaccacacccggcctggatgccagttctttatcagatatgtgtttcgcaaatatgtccacccagtttgtggctgcttgttttcttttcctagtagtggatgttcgctttttgacgagtttggaccagtgatcctccaggatgtcccacattctagtttaatttcttcgctttttcacaagtttttgtcaaaccagattaaaaaaaagcatgatcaaaccttgtgctgtccatagtagatgtattttaaatacaaagacatatgaagtttgagagtaaaagaaagggaaacgatatactatgccaatactagtcatagaaaaccagtgtggctctattaatcagagaaaatagactgcaagatgaggagtattattgatgataaagagggccatttcctcatgataaacaggccagttcatgagccaggcacacaccatcctgagtgtgcgtgcgcttaatatcagagtttcaaaggacatgcagcaaaatgaacagaattaacaggaaaagtatgcaaatccataatcatagttggaggttagaagatcttcttttagtaattgatagattaaactgatagttaaaaattatagacaaaattgatagttaaaaaatttttttttgagatggagtctcgctttggttgcccaggctggagtgcagtggcgtgatctcggctcactgcaacctccacctcctgagttcaagctattctcctgcctcagcctcccaaggaggtgggactacaggcgcccaccaccacgcctggctaactgttttgtatttttagtagagatggggtttcaccatgttgactgggctggtcttgaactcctgacctcaggtgatctgccggcctcggcctcctaaagtgctgggattacggatgtgagccaccgtgcctggccctgtaattaaaaactttcttattgagaaaactctaggcatagtatattttttctagtccaaagcaaaagccagtattaatgtaaaagacctagcaatattatcaatcaccccgacttaattaacatttatacagccgtccacacaactgtagaatatacattctcaagtgcatgtggaatgttcaccatatgctgagccataaagatgtctcaataaagtttgaaagattaaaatcatagagtatattctctgttcttgaaattcaaaattatggaatatctggagaagccccagatacttggaaatgaaataccacatgagtcaaagacaaaatcataaaagaaaataaaaaataattcaaacctaaagataatgaaactatgacacccaaatttataggatttaggtgtaacagtgcttatggaaatgtacagctttaaattcttacatagaaagatacattttagaaatatatttaaaatgaaaatctgtttttttgaaacggagtctctcgctctgtcgcccaggctggagtgcagtggtgccatcaccacccactgcaacctttgtctcctggattcaagcaattcccctgcctcagcctcccaagtggctgggattacaggcgtccaccaccgttcccagctatttttgtatttttagtagagatggggtttcgccatgttggccaggctggtctgaaacccctgacgtcaagtgatcctcccaccttggcctcccaaagtgctgggattacaggcgtgagctactgtgctcagcctaaaatctaatattctgccttaaggaaacagaaaatgctgagcaaattaaactcaaagcagaaggaaagaaataacaaacagcagaaatcaataaaatagagtacaggcaacagagacaacatagctaaaatgtgttttttttgaaaggatcagtaaaagttgacgaatctctacgtaggtagatcagtgaagaaagagagaaaacactttatcaacatcagcaatgaaggagaggatatccccacatatcctataagcattaaaaaggtaagggaatattattaattttatatacatttaaatatgtaattaaatggacagatgccttaaaatacaacttaccaaaactgacctaaaatgaaatagaatatctgaatagccctatatcaatcggcttctttccaaggccatgccaggcatttaatccctgtgaggccaggggctttttattttgtttactgctacattccaagctcttaagatagtgtctgttaccctagcaggtgtttggtaattgtcaaccacatgggtgggtagatgaatggatgtttttatttttatgttttttttttttcaattttttatttttccataggttattggggtacaggtggtgtttggttacatgaagaagttctttagtggtaatttgtgagattttgctgcacccttgtagtcttttatccctcgccccctcccacccttctccccaagtccccaaattccattgtatcattcttatgcctttgtgtcctcatagctcagctcccacgtaacagtgaaaatatacgatatttggttttccattcttgagttacttcacttaaaataatagtctccagtctcatccaggtcactgtgaatgctgttaatccattactttttatgactgagtagtattccatcatgtatatataccatattttctttatccactcattgattgatgggcatttgggttggttccatgattttgcaattgcgaattgtgctgctataaacatgcgtgtgcaagtatcttttgtgtataatgacttattttcctctgggtaaatacccagtagtgggattgctggatcaaatggtagttctacttgtagttctttcaggaatctccacactgttttccatagtggctgtaccagtttacattcccaccagcggtgtagaagtgttccctgattaccacatccacaccagcatctactgttttttgatttttttattatggccattcttgcagaggtaaggtggtatctattgcattgtggttttgatttgcatttccctgatcattagtgatgttgagcattttttcatatgtttgttggccatttgtatatcttcttctgataattgtctattcatgtccttagcccaatttttgatgggatttttttttcttgctgatttgtttgagtttgttgtagatttccggatattagtcttttgtcagttgtgtagattgttaagattttctctcactctgtgggttgtctgtttactctgctgactgttccttttgccgtgcaaaaggcctttagttaaattaagtcccagctatttatctttgtttttattgcatttgcttttgggttcttgctcatgagatccttgcctaaaccagtctctagaagggtttttccaatgttatcttctagaatttttatagtttcaggtcttagatttaagtccttgatccatcttgggttgatttttgtataaagtgagagatgaggatccagtttcattctcctacgtgtgacttgccagttatcccagcaccatttgttgtaaagggtgtcttttccccactttatgattttgtttgctttgttgaagatcagttggctgtaagtatttgggtttatttctgagttctctattgtgttccgttggcctatgtgcctgtttttataccagtgccatgctgttttggtgactatggccttatagtatagtatgaaatcaggtaatgtaattcctccagatttgttctttttgcttagtcttgcttcggctatgcaggctgttttttggttccatatgagttttagaattgttttttctaattctgtgaagaatgatggtggtattttgatgggaattgcattgaaatgagtggatatttttactgaaatgtcatctgatcaccagatgtggcatgcacccctctccttgactctttagtcctcctggtgtggtctgtttttctccacagctttttcccagtcttatgtatattgtctctatgtcaccattaaaatgtgagttccaggataacaaggtctttgttctatgaaccgctttatcatgggtacctaaaaccaagcatctcagaacataggaaatggtaattcaatgttcactgcattctacgctaatgtcataaaagcaacagaatgatccctagagccaagtctttcttggttgtattttcccccactgtgttattccattagtttatcctttcataggtttattttgcacatcacgtggcatgccaccggagacaggcgcgtgttcttccagatctagacagccataagctgcactgtagagcatgcagtcctgttgccgagtctttcagccttcagataggctccctccatcaaaacgaagcctgcagcattacagatgatacactgtcggtacacaatgtaagatttaaaaacatttaaacatgctagttttaactatacttttctttttgtttaatcaccatttattctgttgctggttgttttctcagcctcagcagaaaactgaggttcaggccttaagcaaaatccgggctcagattttccccatgcaccgccctcccttgcattcccctgtctgtgtttcaggcaattaggactggcagctgtagccattaagaattcacgtagcggaacgtttatcgggagaaggattaatccactactcgaatactcccaattagcttttagaccctgtctgccttttcttctttgcaaaaggagaaaggtttttcccacttgatacattttttttctctgctttttagagttccattgtgaccagaagctatttccaccctttgctgtgtacctaggcacaaagctacaaggcttttccctgtgtgtacagctcatggtgccctctctaggtaggatgagctttgctccaggttacctgcctttccttaatttactgaacataaagttggagttttatgtggttttgcatttttggtttaggataatttttaattcttcggtggtcttcctgtggtgtttacaacctaacccctaccctctgccaaaatcatcctcaaaggccatttttgtcttgcactatgttctacccttacccctccggacattaaatagggacataaaatggatcttatcatggagagcacagacggaaagcaaagactgttttgttctgattgttggttataagtctagcttaaagccgaattgcatgatgatgtattgtgataatgtagggaaaatattggccccttcagagagagagagagttgtgccagcccagccatggtgggcaggcaaggttggagggggcctcctggagaaggcggtgcttgctcgggctgagtcttacagaagagaacaaaggcaacagttgtccctgagaggggactggaggggatgatctcagaggaagtagatgatataataaaccagcatggtattcattggaaactacaagcagttctgtgctatgggagcctggagcctgaattgggtttcaaaagaaagaaggccagaaagtgttccaggctaaggcatagagcacctcgcagactcttagggatgtgggcttagataaatccttttgatgccgtgtgaagcctggctctggggagaaaagactggctagagaaactccaggtagaaggccgtcgtatacaagaggccagtggcggcaccctgagtcaggctggtggggcgaccctcaggaccttcctaggacaggtggaggttgagttagagggagcaggtgagacctggactgtgaccaggcaccagaagcgagaagaaggagcttgtgggcatttgttctcaggttgtgagtaggccggaggtccatgagtatggggtcgtgagaagtaggggcagacatgctgcgggcggttcccaaaatacagtttctagagccgaagaaggccaagagagtgaaatctggggagcagaagaggatcctggcaggtgatggggaggagaattgggagaaaatggcatgggggaagccgggaagggtacctgtcagcccgggggaacagagatggaattgatatccattattccaaggagtctggccctttagcaagaagagcactttatattccaagtgaagcagtcctgttcaaaataagcagctccccatttctgagaagatgctgagtacatcttctgccagagaactcagaatgtgaatcagaattctcagccctattaaagtggcatcttctcagggctcgttcctgtaaagccccttaagggcacagccttcctttaaactctcagccaggaactgtggtctcatctggatttgccgccgcagctttccctggactaaagatggacttgtgccaccattctcagaggagggcaaaggacaggggtcagcagattcctcctcctcctgaagggggttcttgaatacatatcatccagaagcagggggtcgtggccccgaaaggtcaggagtggggggaagcggtacttgtgaacagacaactcgggagtatacatcaccagtaaaccccagtcccgtaaaatccgtaaggctgcaagcttattgtcattggtggtggtgtttttggtacttcctctgcccttcttttattacagttaaataattattccatgagcaattctaaataaatattatttaataggatttattggttttttgtttttttaattgggattgtcattatcaaatagatgcctcttgtgttggtatacagttaattgttgcttctgttgaaagatggatcatgggccgggcacggtggctcacgcctgtaatcccaacactttgggaggccgaggcgggcggatcacctgaggtcaggagtttgagaccagcatggtgaaaccctgtctctattaaaaataccaaaaaaaaattagccatgcatagtggcgggcacctgtaatcccagctactcaggaggctgagacaggagaatcgcttgaactgggacttggaggttgcagtgagccgagaccgtgccattgcactccagcctggacaacaagagagaaactgtctcaaaaaaaaaaagatggatcataaagcttttgaaatacactattatcagaaaaatacgtgatttttaaaaagtgatatttatgtcagaccacaattatcatttgttaaaattgttactttattcgtcttgagaatctagcggtgtccaagaaaaagttttatggtaaacttgacctttcttttctgagaaattctagcattttgtgtttgcttacagtagtagaaggccattaacaaaaactccatttctttgggagaagtgctggaaatgtttggagtatttctttatgagagcttaaactttaacaaacaaatgatttccttgatgccaagagatacaaaacctgagagtgcagctgcactgacttcgcgggtgccctgcatttaaaaccacggtcatagcgctgcggtgcccatgcttgagtgcgcccagcatcacctgcaggctcacggagccacagactgccaggccctccctgagcctctgcttctgtggccgtgggtggggcctgacgatttggctttcttgggtgtcccacaaaattgctgctgcggccgcttctgctgctgtctgggttgtctgcctttgagaacccctggtatggacagtgtggtgtgagaggcaagcaggatattcatcttatggtttggggtcactctgcttcttacgtgtcgggagagacacttccccgaccccttgttttccatctctaattttagccgtctagggcagaaacagtcccgggtaaacaccaaggcctcgtgggaggcacctaggaggtgaggaggggctacgtctgccgggtctccaagcaggagtgagaaccagctagacaaggggaggcctgggagtgcgagggggctctggtgacaggaagtagtcccctctgacccggtgacaccgtggggagcaggtgatgtggttccagtgctctgtcatcctggggtcagtaggatgaaagatgtcgtagcagcacaggcagcactgtggaaactgttctcacgactgtgagtcattgaggctcctggacgcggcggaagtgcaagcgggaaaaaggatggcaagttgagtaacctcaggggtaagcaaggaggtgtgagaatcactcacttcctcggcagggcctgcacgcacctggtgcaggagcagcagaagccatgctggctcttcctgctgcgtgtgcatctggccctggaaagaggcacacccagcagcgggctctcctggctcacccggggccgtcagggcgctgcagtttgcaggagcatcctttgggctcttacctcagtcggtggggctgggcagctgggtgtctccagcccatcatgctggaacatgctggaagcttcctcagggtactcgggcttattttggtagtcatacacatgaaatgcactttgggggagaaggatgaaatattttggttaatccactgaaaaaatgaatgttgaggaacacagccagctttcctgttatttattaataggcttaagatagccagaaggacatttctgctagaaagttattgccagctgaaaaagaacaagtcttcattattatccaatttggtatatatatatatatttcaggtttttatgaagctaagggcaaaggtcagctgcttcctattccttgtggattgtgctgctgatgggaacttcctttgacttcacaaatacaagggattggaagtgcattctttgttatctcatatgtaagatgaggcttttaacacgattttcttttagttaattttaaaatattttattataaaattcattttttttcaaatggtgcagataagcataaaataaacaataaaagttcttcctttccttccctccaagcctttgtgtggcacgttcttggcatgttgcaaagtgccgtcatcatcatcatcatcattgagtttggaagaggaaatgataagttttatttttcccttctcaaatttttgaatttgaggtgtcacaggcaatcaaatgaaaataaccaactctctgtagaggtggtagttgcagctgaacatttttgggacttcaatgtttaggcagtatttaaaaccagggagttatatttgattgcctgggagaagatgtggaataagaagaatggaataggcccctgacgataagtttttaaggggagggtggaagggaggggtcccaagctgggaaactttggaagaatgagctgaggcagccggagacctggggagagagtgtgtgtttgaggggagacggcgcatagatgtcaggtggggcaggaatggaagagaccatgggatgcagcatgtgaagaggtgactatgtgttcagtaatttctggagagcagttaggatcaaaactaggtttgcatttttaaaaaacaatttgaaataattttaaatgtacacgagagttgcagaggcagcacagagagttcctgtgtgtccttcatccagctacccagtgtcaacctcttacatgacctcagcacagcgatcaaatctaggaaacatatgttgttacagcactgccaaccacacacagcctccttggtgccagcagccttgccgctgtaatcctctgtatgtcttgtggtccagcccaggcccccacccacattggctgccttgtcctctggtcctcccagcctgggatggttcctcagctgttcttgtctttcatgaccatgacattgtaagatgctgctcaggtgttttggaggatgtccctcactttgggtttgtctgatgtgttctcatgatgagattgaggatcaaagttttgggaagaataatgcagatgggttattctcagtgcatcaggtttgggggtgcgtggtgtgtgtgattcttattactgcagataccaaccttgatcactaggctgaagtggtgccttgtgtgtttctccaatgtgaagttgttattttctttataattcataagcatttgaaggagatactttgagagtatgcagatatcctgtttctccttaaactgccatgccctaattctaacattcatgtgtaattactatcctggtgttctaatggtggtgctgtacctccctatttccttccacgtttagtaactggaattcttctgtatgaaagaattgttgcttctcttgttgtttatttacttggttgtttgtttatatccatatggagccactaatatttattttacttcttgggttataatccattattattatcattatttattttgttactgaaattgtttcaactttgaccactgacacaccttctagcattttctctaccacagccctggatcaaccatttttccaaggatctttggcttttttgagagtgggatttagaaaccaagatgtggcctctttgtgtgctcgttactactggagcattagtgttactaggcctaggccctctccgtggacttagctaagtgatgcatttgtgtgtagtaagctgtaaacacatgcatattgatttgcgtatctatgtacaggtgtggaaactagattttaatgactaaacaggaggtaagggactagggactggaatagactaatctttccagaagtttggtgatactactgaataacactgttttttctagctttctctgtaatacaatttttgcaataaatacatagagagcatgtgattagaggagcctgtctgttggggagacctcgaagaaagaacaaggctaagcagggatgtttagtttctgcaagaggtaacttatgtttgtagataggagaaagggggttgctgaagaaagtataaatcagtggagtaaaggatgagaaatgggaaggtatgagaagattaattcaggacagagatacagcatttgacttggcaagcccaagcactcttctctgagacgtgggagggaaggagaggtgaatacaaatgtggtggagctttgaagctggacatgagagctggttccccttggagcctgtctcctgttaagtgagaagccaggccatgtcctgagaggtgggggccatgagtgccaggatggaagggtcaggagagaggagacatggcaacccaccccttcctcatgtttactgcctggcatagttggcatttttctttatgttgaggaaaatgctgctatgatctgattagtaggtgctaaataccccagtttgtataaagtaggatggtatctttgcagggctaatgaaatggccaaatcaggtttgggtaaggccacctggagatccatgtccttcagctgatggcagtcttcctgtgtatcccagctatccacagagatgcttgcgagttctaccatcgcaacagcggcgaggccaggttctcccatcccaacagtggtgaggccagaaatttccaggctcatcacatctacctgctcagcctgtggtgggttggagttggggttgggacaccccacctgcccttccagagggcgactgtctgcacctgcccagtgtgccccccgttccctcctctgcagtgtcagagctgctgtgcctggatctgaggaggggccgtgggagaagaagccgcccccacgacacttgcgcttgccttttcagctggagcacggggtggcggcaccgtgtcgttctgcccacctcacccactgggatgcaaacttgctgaggccagggcttcttcctgccatgccttgccaccacgccccttgcctcccctgggacatgccgttctcttctttgtactcatctgtttggtatgtgaggggttttgcgttttgtcttctgctctgtaatttaaagggataaaacgctcacatttaacttaagccaaaacccagtttcagtctttccaccagaaatccctgagatgtagaattgtgggaagctccttggaggctggcgggctgctgggctgcccctctgtgggaagacagcctgcaggcttcagtgggctgggctctcccggccatggctgccttggtggctaactcaggctgcggcgacagactggtgaggcaggcggactcttcccctgatgtttaatataacctgacagataaagtggattgtaatgaagaaattatctaaaacccatttctatttctttgtttgaaaagaaaacatggccttgaatatgattcttggagaaaaagaagagacgctttgattaggaattattctctgtacttttagttttggatcaagaagaaatgaaaaccattggccacaagctcttgagtgttccaagcagccttccgtgtatacagggggcttttcaattctgggctggtgtgggttggtgcagtcaggatgacagaggaatattccacaggacaacgaggagtgactctactgtgggcgttgtttctgcccctgcagccggggctgtgaggctgcaggctgccctttgctggtttgcaggggccataattctggcctggagcttgacaaacgacccaggacctctgagatgggaaatgaggtctgcatcccgtgttctaatcaggattcgctatcaaaggtcattttccacactgtggcttaatagagttggttttatattccctgagggatacagacttccaaattgttgcagtctcactaactgtaatgtatacagctcatgtttgaaaggaaatcgcctctcctccaaggcagcggttctcaaccagggaaacttttcccctcaggggacactgggacatttggcaatgtccagcaacctggagattgtcacatctaggtgtgggggtggctgggtggtgctgcggaagattgtgtggtgcacagggcagccccacaaggagcggcccggccccaaatggccctggtgctgagagggacagacgccgctcacagagaagcgaccacagaggcccacatccaagcaggcttcccagagcaggcggggctgggaaagctgttctgtggcgcagcatcccagtggctgttacggggtgaaagcccctcttagaatttaaagtcctagagcagagaccaactggggccatccatggccctgtgccgtgctgcctcctggacgcacgctaggaggtggagatggtccagccccagcaggactgggccacgaggaccctgccggtaacctggtgctcgccgcccacagatcacggggcgtggagggagagactgccagtgctgtcctagtgcagcagtacctcatggttatgacggatcatcttcctgaactttgcatctcagaatttaaaatggagattttgattttgattttggcaaatgtggaaaatagatttcagctcaaaaagcaagacctgagaacatggtgtgttaaaatatctttcatttcatgccactttgcagccctgggaccctcggggttgtacctagaaggtagtaaagatgacagcagcccccgtttcactgatggtggcgcagaggacgttgtgaggtggctgtagggtcaggtggctgtagggtcagggctgggcaagttgtattcagatgctgttcgctaagcccagaacattataggaggtaaataaatagcacgcagtgttctgggggtaaaaagatacacccatgtcccaggctgctgccaaaatcctttctcctgtcagcgtggggggtgatcctgcccaattaaaggacgtcttttggcccttctttcccttggcagcagcatggaagtgggtgggggaggagaggagcatgcttcccccaacccctggggacctgtgagcgcagcctgcaagctccggctccaggaggaagcgtgctcaagtgcacctctgaccacgtcacgctgcgagaacgtgggcgctacacctccgaccacatcgtgctccgagaacgtggacgctgcacctctgaccacgtcacgctccgagaacatggacgctgcacctctgaccacttcctgctccgagaacgtgaactctgcacctctgaccacgtcacgccccgagaacgtggacactgcacctctgaccacatcatgctccgagaacgtggacgctgcacctctgaccacatcatgctccgagaacgtggacgctgcacctctgaccgcatcatgctccgagaacgtggacgctgcacctctgatcatgtcacactccaagatcatggacattgcacttctgatcatgtcatgctctgagaacatggacgctgcacctctgatcatgtcacgcttcaagaacgtgaacactgcacctctgaccacgtcacgccccgagaacgtggacgctgcacctctgaccacatcatgctctgagaacgtggacgctgcacctctgatcatgtcacactccaagatcatggacattgcacttctgatcatgtcatgctccaagaacgtggacgctgcacctctgaccatgtcgcgctggccagaatttggctgcaggacagacttcactggaaaggaaactgggccatgtgctcagctacaactgctttagaagagagagaaaatcagatattagcctagcagtctctaccacactggcatttagataattttcagcttttttttttaccagtcaaaacatctcatgtacaaatgcaagtatttctataggatggatatctagaagtagtcagaaggaatgtgcctttaaaatttttgttaagtacttcccaattgccttccatacaagcttcattaatttacattcccaccattgatggatgagtgccctgcatcctcccacaatggggcattattcacattttatcctgctttccactttgctgaataaaaacagaatggatgaatgaatggatgggcggatggatggatggatgaatggatggatggatcgataggtagatagatagattctcattgtaatttgcatttctaataaagagcatgaaacttagaatcatttttgattcatttttcttctgtgaattgcctgtttgtatgttttgcctgtttgttttcgttttgtcccttgttgatctgcagcagaagtttatatagacacatctaaaaaattctctgtcatgtactgtgtacctcctttcttctaaaattgctagtcattgatatgtctttattagaattatagatttttttatcttactgtatcagtcagtctcaagacttattaggttttgtgacttgcttaattaaggcctttcatatgccaaaataaatgaaaattttcctgtgcttttacatttaggttttcagtccactctggggtgtgtgtgtgtgtgtgtgtgtgtgtaatctcagatagcaaaataccaaatggctggttagagtttccagcatcagttattgaattgttaattccttctttgcagatttaaaatgctgtcctcattagagttacgtatgtgggtctatttctggactctctcttttctgttgatttgtttgtctccctcactaataccatcctgtaattaccatagatttatagtatctttaatatctggcagtgtgagtccctattcattattctttattaatttttttttgctcttgtgcttttttttttctctgtactatataatcatcttgttaaattccgtgaatggaaaaaacccagaaggtattttgattaggcttggactgactttctggattcattaggcaagaattgacatctctagatccttcagtgggtttatttacagagagcatttccaggtgttctattatagagcagtgattataaacagtccaccaaacgcggacagttttaacaacatgtttggcagagcacaggtagaatggggtcctgcccacgatgatgtacgtgtctccacacaccccccacacatctgcgtcgttggtatactgtatcatcatgtctgagatataacttacgtctgagatgtagctgatgtctgaaatgtaacttttgtctgcttctttgctgtgcacggacaaagcttctgcaggcttcctgcacgccatacttccccaggctttgctggatctggccttctgtccctttcctcttgagttataaacaatcctgtaggcagtaccagcggcaggatatgtggcttagctgctaagaaataaactcacttttactgtgactttgatttttgccaatttctgggaatttgatttctgccacagcttcactacttacactcttgatgtccaaggaaaggtaaataatgaacgtgttctgtggagaagaattccttaaaaatgttagctttgcgttcggattgtaagtgtttctcaagtgagatgagaacattctcctctgcatttaccagaatcactagtgtctgttcaggcgctgaacagtatggtgtgttctgaaaaatgtttcactcagcagattagtgttactaggttattgttctgtgactgaaataaatttatacagccaaacccacttataccccttaagtatgatctttcaaaagtcatctcaatgacaaagtgcttatggacctctctgaaattaaagggacagtggcatgcaaatttgaggacccggccaactcttagagctcccctcccttgtaaatgatgtgtgtgttgtgttatataaacccagagatgtgacagagttaaaggacaaatggagacacggagtgaagagcacgtgtgtgagacagctgtgggtccatggagggaggccccgcggcgggaactgaggcagccatggggtacatgagggaagccccacagtgggaactgagacagctctggttccatggagggaggtcccgcagtgaaaactgagacaagtttaaggagttgaccagcagctgaacccagcggcagctgcggaggagcctggggctagggatgatgactttggcagccacctggtgtgggcgctactggagtaaagcagcatcagaggagatgtggagaaattcagtttgatggtttttgttttttgagactgagtctcgctctgttgcccaggctggagtgcagtggcgcaatcttggctcactgtaaccttcgcctcccgggttcaggtgattctcctgcctcagcctcccaagtagctgggtttacaggtgcccttcaccatgtctggctaattttgtatttttagtagagactgggttttaccatgttggccaggctggtcttgaactcctgacctcaggtgatccacccatctcagcctcccaaagtgctgagattcaggtgtgagccattgcgcctggccagtttgctgttttttatagttttgtataaaggctaactcagcgtctctccagccaccaggctcaatgtgtgtgccttttgtaacggtgcagtactcaccagcagcccatattcctgagacgcacatgtaacgagcgcactttgtgtgttttctagaactacacgcagtacatccctctgtccatatatgacctgcagacgtggatgggcagcccgtcgatcttcgtctacgactgctccaatgctggcttgatcgtcaagtccttcaagcagttcgcactacagcgggagcaggagctggaggtgagcgctctggtgcttggagagcggtgctgggtttggttttgttttccctgggggtggggtttgggtggggaggttgggaggtgttggacatcctctgaatggagcagggctcagaatgccaagggcaggatggcatattcaatgctgttgagctagggaggcactcagcacactttatttttgaaacataatcttgttctgttgcccaggctggagtgctgtggtgccgtctccagtcactgcaatgtctgtcacctgagcccaagcaatcttcccttctcagcctcctgagtagctgagactacaggtgcacgccacgccaccatgcctagctaatttttgtagtttttgtagaggtggtgtttcgccatgtttctcagcctggtctcaaactcctgggctcaagcaacgcgtgtgcctcagcctgcaaagttctgggattacaggcttgagcactgagcccggcccagtacaaacctacagacttatttttacatctcattttactcagtgtcatttttaatccaaacattaattgataacattcatagggtcgatttgtgccccagcagtctctgcctccaagataaatgtgaaaataaagcagacacatttattttaggagaaatggacccacagcttcagttccaccagtgcctttgttcctgccccggtttctttttctgttgtgttaaaaaaaaaaaaatccccgaaaaccactaagctaaaatgatagaaaacaaacgaaaacagctactgttgtagcgcccacttcaaaaagcggaaagcctgtgcaccgctctgctaatgaagagacattttgcttggttgttttaattaatatttgatgtttgaattaaacagtgaattctgaggacaaattgaagaggcagtttcgattaagaggcctccatcttgtggcctgcacaagagtgtcagaatgaaatattctgcagcctcaagggggtcatgagttctactggttgcagtataggaaattctcaatttaggagcaaaaatgatcttgagtatgtttcctcaagcctttttgaatatattcaattttaatgtattatgttttcacatttcatcatagaaaaatgctgaaacaatcagtaacaaaatttgaaattctgtttggtagattttcacattaacatgtgtacagttgaatattttataattattaattctttatgtggaacaccgcaaaagagtgactgataagtataatgtggtttatccatgaaaaaggatccacatgcaacaagtttgtttgttttgttttctatgataagggaaagaaagatcaaggtttgtatcatcagatttttcccttgctttcaggcatttcatcttggtttacccaggggataggttatctaatgagcattaagaaactcaaagcattgagaggtaatttatttttccttgcatcaagtaataaatatcgcaaaaaaaaggtgatttttttacatttataatatgtaaataaaaatgccaaagaatcctgcctgagttctacaccagatttatgggctggagagtggttaagggaaagaccaatacatcagcctcagttaattaaaacatgttaaatagagacccgctcccctttcagcagaagaccagcacctccagctcatgcataataccaaatgcttgcattccagcgctttgagcatgtgctccggcagtgctgtgtgtgctctctgtgtgttgccagggattaatcagcctaagacactgttcatttcatcaagtgtaacagaaaagattcccatgcatcttttttaggaaaaaaaaatgtttgactcattccacatgaaagagatcagatgaaaaatatgttaactgagttggcgaatagatggcaaggcaatgcgataccgtatgtctttaattagctctgatttttatcttcgttctttaattacaatgtagatcagtcttgtgtgtttctattacacttactattattggctattgttcacttggtctcttataaaaacagtggaaattaaaatgataaaattagctcctagctaatagcttaatgttcattttagtaatttcactatctgctagagaaacagcaatcctgtgtagcctgttagggtttttcttttaaaatattctttgcctctttacagctggtcaaattctttgtaaatttacaatatgttttaatactttttattgtataacatgtgagctgaaagaaattgacaggtgaatgatttgttccagggtttaaaaaataaacaattgattaaatataatgcaagaaaatggttatttggaccagaaagcctccaaataataaacattaacacaaatatgagtgacataaattttaagagatggtgatcagctttcatattcttagtggcacagtgcttgtcctgggaccaggaggtttatttattgtttacttctctctcagaggagtgctgtaggtagagtagaagacgacttcatcaaagcacagatacagtattgcacacacttcaaaccatcagagccggaaaatgacatatctgtcactcagtaatccttcttatatttttattgtgtcatatttctttgtaatttaaaaattaaggataatattcaagtctctccgctttcagtcttcttttataaataagtatattttaccaaattagtatatgccatggtttgaaaaatcaaataatacagaaggtttatgatgaataaagtagtccctggccccacgctttctctgctgagactctatgaccaaaggcacctccttcccctgtttccatttctagttcttctggagggtgtctccttccctgtagatgacatgctgagaccactgcttcttgatttgtcgtttttagattatcagtgggctttgtcttagggtacaaaccaagaacagagctgccattaagttctgtttaaagaagggagaaacgatgtggaagcctgttagcaaagaagtcaattatgtgtagattacatgctggtttaaattcctatgtgttatttgtattcagtagtgaattctaaagagaaaattctagattgaagaggctgcgtcactcacgacgccttcttgcgttccctcttattcactctattgggtttctttatactttgtaaactttgtggtttcaagtaatatccttatgcttttatttctagttttatcagtaatagctcatttcttccattttcaaggctcttagcttccttgtactttcttctgccttttttcttttacagcttctgttatctgcactttctgtgattgtctttcgttctctgaccacgattaacacctctgtgcttgagtggagattgattctataggaagacaagcattaaaccttgtacctgattatgaccacataaatattgctcgctcagtggctagagtactgtgatttccatttttataactgttttcgtttgtttgcttttcctggacatttcctcttttcttcttgaattacctatcgttaccacttcctccactgatagatccacaaggagagcggagagcacagaaggcgccctctcccctcacatcttccaagctctcctgcctcgctcagccgatcgtgcctgtggcctgctccccggcgtcagctggctcccctttgtaattctccaggatccgtccctgtgtctagatcccacttcttcccctctctcgattttctcctttgttctcctaggggaaatcctcaagcactgccctaagaaaggatgtttggcagtctgagaccatcagtatttgaagcagtggaagtaatgaaaaatctcattactgggttttaatcaaatagcagtttgtctttttcactaataaggtctctgaggcaaatgatgacttttcagcagtgccactggggaccaggcatccttagccgactggctttatcctcatgtttgcaatatgcccaccacatctgcaggtgtttcatctgcttgggaggcaggaggaaatggggaaggggcagtgctggccacagctgtctctttataaggaagaacagcccgccctctgtatctgtggcttccacatccttggagtcaactaactgtggctccaagacattcggggaaaaaaaattgcattgtactggacatgtacacttcttctcaccattgttccctaaacaatatagtataacaactacgtttacagcattcacatggtagtagatgttataagtagagatgatttgaagcacaccaaagtctgtgtgtgggttatatgcaagcaccacaccattttatatctgtgcattggcagattttggcatccatgggggtctaggaaccaatgccctgtggatattgagggatgactgcaacaagcagacttcgctttagaccgagttggccagagccaggtcacgtagcaccccaggtgtggttgaggggtgactaaagggagtggacttgggggtggctgtgagatgatccaatgaggaccatcagccacattacctgggtaatgtcatcattctaaccacatccattatcgatagtgtagatatggaattttaggcaattttcactcttccagtggtagccctgttactccttgcagtggatgagtagatgttcttgataagtctgccacctccatccagataaatgccataagaggaatatttatagtcatcgtacacagtatatgtattgactgagttggagagagagaaaaaaagagaattcaaatgttttttaacaacttttatctggatactaaatccttagcctgtaaactagaaaggaaggtgaagtcttaaagaaacagatgctcttggaaacggagcccatgaagtcttgtccgtcagtttcttctagaggatatttctcaagggcagtcacagctcaccgtcactgaagacggcagtcaagcccggagtcaaatctaggcgagtttctcctctttttaatgggaggccagtagcgagttgggcaggcggtaaagataataatgcctttcttctgctgggacagcacgggctccactgccccagtaagtcttgttctgcacatagccatctgcttttggtttagggctggagcataggcaagtttttggtgggagccatggaaatagcctgagaatgacttcctggagagcaggttgctgtgtgtcagaagagtcttgtatgaaagttcagccctggccggtgcggtggctcacgcctgtaatcccagcactttggaaggccaaggtgggcagatggcttgagttcaggagttcaagaccagcctgggcagcatagcgaaaccccatctctacaaaaaatacaaaagttagccagctgtagtggcacgcatgtgtcatcccagctactctggagaccaaggtggaagggtcgcttgagctcagagctggaggctgcagtgagccgtgattgtgccactgcacctcagcctaggcaatagagtgagaccccatctcttaaaaaaaaaaaaagttcagcccatggatcatgggcacaattcacttctccactattcccccgcactctgcaaggcttttctcaggatgcttccgagtaactcgtgtttgtgtggtgtctctaaacacaattgtgtggtccagtcctgccacctgtagcagtacactcccaaagcacagaaacctgtccgacggtcactcactgccacagcgagaagcttgcttgggtccacagcctccccaaggctgcagtgacttaaccgccccccgcccctaccaatgtgaaaacctatacttaaactgataggtgatacattggcctcctgcactgatccccgtagctaaattttatgtcaaataaatattgtaattctgccaaaaatgactaacgtctagaatcttcaagtttcctcaaaaatattaaatgcatatctcacagatctaaagtactcatgttctgaaatcttcttcatttctttgctactcttgtagacaggcacactgcttggctggcatggaattctgcagcaaaaggcagttctcctgctgaaggttgtggttgtagtgattgctgaataccatcagttagttctttgggtacctctcaacaggtgtgtttcttaatcactgtttcctaaattggaatttgtgtgtgtgagtttgcaaatcttctccacggactcaccgtcgtcatggcatttgtgattcagaggagggatctgcggtgccgattccacaggagctcaggctcgcctgtatttctctttcaagcaatgattttcataagtgctttcccctgtaatctcatagttttgtcatttgtaggcagtagggacgtgagctgacatgtgttaggtcacaactttattaattttcaagtgatattaatttttaggtttgaagaagatgctttccccttttctaagttgtctctgtttcctccagcataattttttttcctttggttaatttagattattctctgtcatactggaggtatgtggtgattttattgtttgtcatatttaagaatgaagagaagctgcccatcactgcgtgtctgtgacaggaggcgttggctagagggccttgctcgatgggaagtagggggcgctggctgctgcgctggggactcatggatgcccccatgccgaggtctttatttctctgggctctaaatgactacaccagctgcctttaattttccccagatatgtcagtaactctctttagaggaaaaaaacccaccaccagcctgagtgctttccggcaggggggcggtggtggaggatcattgcagaacacctggcttcaggcacacaggtgagacgccggctgtcctgatggcaggtcttcaggtaatctgtgccttccagcccgcaccactccaggcttgggcatgggggctgccttccacttcccttctctgcatgtgctctggacactttcagttcctcttttttaacaaaagttggccaaagtcagttttgcgtaccttatactttatttatagtaagctgtaagaacccatacttgtgaaggttttcaaaacattagaatatctgctccctggtgttaagaaatgtgtaatatagttgaagcacatatattcattctttctctctctttttctcccccgcccccccgccacactcactccaccaccaccacaatgaccaaggagaagtgcatttttcatttagcagaaatgctgccatttccactgtctatagcagaaggggagttcgtccaaaacatacagtagaaacccctttaattggaatccacagaacggccatccccaaagccccgctggggagaatgaagccactgtgagaggttaagagggtgggggggcagggctggcccttggagtgggctggcgagctgacttgccaaccagaaaggaaataggtcacgggagaaatggggggaaacacaggcccatggaggatgaggtccacgcctgccagtgggtgctgggagggcagccccagggggagcaggcagcaggagatgcccagcccggccccgtgtacctggcaggcctcagcctgtggacaccctcgcctttggtttgtgtgacatttcacagttggtgggacatttgtgccgtttcatccatctttagtctgcgcagctgagctgaatgtggccgccaaagcttttgctgcttctctgtgcccatgcaccatccctttctgtggtttgcacggggagataaaggtcttttttgttggcacctttcgtaactccgagtcctagaatttggaggcttcagtaaaaagaaaagtgatttctctgcataaaaaatttaagaacccttaccgctgatgaccttaaatgaatttcacagacacgtgtcattagcacaggcagcttccagggtgcaactgaagttcccctttcttcacaaatgcttcccccagcctgaaatcttccttggctgaccacatacggcaatctcctacacagcggccttgacaatcatgtgttgtcttgtagcctctcttctactgtcataagcttactttacatttgttatgtaaacctgtcaagaatgcctcacgttaaattgatgctcaggaaggatctatagatttggcttgataaatacatatttgaataaactacctttagttgtcttctttagatgtatccatgatgcattaaatatatttgatcttcaattgatttgtatgaaatgtgagaagaaacaaagaaaacttgattagccataattcatgaaaacgatacactgtttgcagttgtcataaaactgggagctttcccaaaaattcttagagtttaaccttttttttgtttctaatttcatctattttaaagtattgtctgaaattgcttgatattctggaccacagatgatggccagcaccatgggttgcagactggggcactgtgatcccagcaggacccatctgcctggccctgcttgctgtcgcgggaacacctctgccgccaccacggaggccgaggggctcgccccgccccgacgcggaggcagatgtctttcacaaaggatcctggtggcacagggcagtggagtttctggctgaaggtggagcctcatgagaggagaggggcaagtgggaagtaagtgctttcactgaacactgaggtcagaaacacggaagaggtgttcattctcacccatcctctccagcatcacacgataagtccgtctgcgcagaaggcaagggcaggaaacaggcatagagatcagaaaagaagttaggccatcttttcttgaagtgatcacctgtgttgaagtgtcagctgttaagtatcacagtgggatttacaggatactccctccagcagcagccaatacacacacttttccagcgtccatgcggcattcatcaaggtcggtcacatcctgggtcataaaataaacctcaacaagttttaaacagcacagcgtgtgttctttaaccacaagagaatcagctacacgtcaataaacacgagaaaaaactgtgaaaaaaattaaacaacgtatttctaaataatgggtcagaagcctcaagggaaattaaaaaaaaatacatagagttagatgaaaatgaatatacaacatatctgtatttataggatgcagataaatcagtattgaaagagaaatttatagcactaaaatcttatgttagaaaagaggaaagatgacaaattattgatataaattcctacttcaagaaattggaagagtaaaataaactgaaagcagtcagaagaaaggaaataataacagaaatcattaaaattgaaaacagaaaaacaatggagaaatattaaaagctgattctcagaaaaaaaatcaataaaatggatacattcctagcaatactaacaaaatagaaaaatcaagagggagatggaaaaacctctacagatcctgcagccatttaaataataatgaacaactttacactcttaaattcagcaactgagaggaaatggaccaattcctcgaaaacccccagctaccaaaatccaaccaattgaatattctgagtattatctgttcagcaatagataatctgaatagtcatagaatcatgaaagaaattgaatttgtcatttaaaattgtctgaaacataaatctgcaggcatacatggtttcactggagactattgccaaatatttaaaaagaagaagcagaacaccggttttgtacaagctcttccagaagatagaagggttgggaacacatttcaactcattttatgaggccattattatcctaatgccaaaaccagacacaccgttcaaaaaaaataaaaaacagcaaaccaatatctgtcacaaacttagatgccaaaatcctcaaaacaataatagcaaatcagttctagcaatttataaaaggaattatacgctgtgacttagtgagtttttttacgggtgtagaagtctagttcaatgtttaaaaattaattaatgtacttcataccaacagactaaagatgaaaaatcatacgattttaccaattgatgcagaaaactctttcatgcgagagaaaacaaacaaaaaaaaaactttcagtgaactaagaatagagaagaacttcaatttgattttttaaaaaatctgtaaaaacctaacagccgtccttttacttactggtaaaagactgaatgtttcccccttaagattggaagcaaggcaaggatatccattcttatcactgttattcaacagaagtactggaagttctagccagtgcaataagacaagaaaaagacatcattggttatcagggaaacgcaaatcaaaactacagtgaggtgctacctcgcgccactagggtggcagcaataaaacagatgggtaataacaagtgttgacgaggatgtggagagattggaatccttgcacactgctggtgggaatgtaaaatggtacggctgcttcagaagatagtctggcaaggttctcaagatgtgaaactgagggtctccccgtgacccagcaggagagtggcatgcactctagaatagcgcttggcccacactgggcactcagctgacccctgctggcttggctaatgagcagagtaaaaacactcctccctggcagtgtgggggccttccgagtggagggtggtgctggtgtgggggccctccaggtggagggcagtgcaggaggccatggcaggcagtggcagtgcttggactaaggtggtagatgttggcaaggcaattgtttgcatctggggttcgttgtgaaggaagagtgattcgctctggatcagatggaggacttaggcaaaaggagttaaaggcaacaccagtgttttggcctgggtggaatggagcagctgtctcccgagccaggaggaccatgaggctggagggtggatggaggtcttggggtgcaggacacaagagctctgctcaggcaatgtggggtgtggggtcctatcagagatgtttgttcagcatctcctgtaaattaggaagggtgacagggcatacagcagcacgcaagtggacaaaccctggctctactttcctgagaatgcatcagaaggtggtcggtgtcatcctagaacagacaatggctgaagccacgggatggtgacgagcccccatgtggttcgtgtggctggagaggagaggccagtcgaggcctgcgttcggtggtgtgtgtagagtctgggaaaaggagaggcactgacagaccagaccagagaagtagccaggcagttggagggtaaccaggcactcgtggcatcaggaagtcaggaaaagcctcaggaaagccttctagaagtagggacagttagctgattgctgtgctgttgagcggctcacacgaggaggactgaggatggaccgttgtatttgtgcacacggggccattgctggatttaacaaaagcagtgtcaacgcagggtggtgggctctcatgtgattctaaactgttcaagagagggtgggcgatgccatgtggaagctcctgagggaggtttgttttcgtcacatggacattatgagagcatgtgtttgtgctaatgggagtaacctggcagagagggaaaagctgatgtgtgggagggagagagagctcctgagggcggcccttaagtaggtgtgaagggaacaggatccattacacaaggggaggagctggctggaggcggagcatcgacggtggtcattccagaaggggatggcagcacatgcatgcagaggccaggtttggaggaaggatgcagacgcacagcacaatcaagtttaggaggagcaggtacacacacacacacacgtatataagcacatgcacatacagacatgtacacatacacatgcacatagacaacacatgcacacatgtacacgtatactcacctacatttacatacatgtatgcacacacatagacatatatgcatatagacatgcatagatgccacacacatacacacgcacatatacatacatgtccacacatataaacacatgcacatacacatacagccatatacacagagacacacatagacaccatagacacacccacacacatacacatgcatgtgcgcacacatacatgcacatatagacacgcacatgtatacatgtgcatacacacatgcacacgcctatatacacatatatacatgcccacctatacatacataaacatacacatatacatgtgcacacagaaacatggacatatacacacatgcacacatacacacaggtacatgctcatacatgcacatctacacactcacctatacacacacacacacacagcttttggtgccatgccgcagcacattcctagtgcttcacatatgttcctttctaattggtgtttgttttagaaggtggagtgagtacacgtgtctggatccagccttattagattgtctttgcgcactgggaataacacccactttatgctcagctcttactagtgtctccagctttccctctcctccttgttaacagaattggaacccttcctgtcttcccgtctctctcctgaaattagccaaggctctctctcttatgactcagttcattagagaagtaagcagaaacacagcagctgatgatgaacaaaatgtttccgggggtgaaggcacccatctggcagggggcagggcgctcttgcaggttccgccgtgcagagaagaagccacaaggaccgagggaggcctgaaggagatgtctaacctgagccgtagaacgtaagaagttgccagcataaagacaggtaggaaaggcatgtcagtgacagaggcaggagaacacgtgacccacttgtgtggggagctccagcagcgcgttcggagtgctgggcattgccaggtctgaaagaggtcatcagttcttgggaaaggtgcctgcgtgggctagaaatcatggaacaaatcataaagccaagtagtaatttaaacccagatgctactttaattaactcactttgctactttgccctcggcagcaagggttgagggcacagccctggctactagcacagccctggctactagcactgtcctggctacgagcacagccctggctactagcagagccctggctactagcactctcctggttactagcagagccctggctactagcacagccctggctactagcagagccctggctactagcacagccctggttactagcagagccctggctactagcacagccctggctactagcactgtcctggttacgagcacagccctggttactagcagagccctggttactagcacagccctggctactagcacagccctggctactagcactgtcctggttatgagcacagccctggttactagcacagccctggttactagcacagccctggttactagcacagccctggctactagcactgtcctggttacgagcacagccctggttactagcacagccctggttactagcacagccctggctactagcactatcctggttactagcacagccctggttactagcactatcctggctactagcacagccctggttactagcactgtcctggctactagcacagccctggttactagcactgtcctggctactagcacagccctggttactagcactgtcctggctactagcacagccctggttactagcacagccctggctactagcacagccctggctactagcactgtcctggttacgagcacagccctggttacgagcactgtcctggctactagcacagccctggctactagcacagccctggctactagcactgtcctggttactagcacagccctggttactagcacagccctggctactagcactgtcctggttacgagcacagccctggctactagcacagccctggctactagcactgtcctggttacgagcacagccctggctactagcactgtcctggttactagcacagccctggttactagcagagccctggctactagcactctcctggttacgagcacagccctggctactagcacagccctggctactagcactgtcctggctactagcactgtcctggctactagcactgtcctggctactagcactgtcctggctactagcactgtcctggctactagcacagccctggctactagcactgtcctggctactagcacagccctggttactagcactgtcctggctactagcactgtcctggttacgagcacagccctggctactagcactgtcctggctactagcacagccctggttactagcagagccctggttactagcagagccctggcttctagcagagccctggttactagcacagccttggttactagcacagtcctggctactagacacctctgctagagactgcccaaagaatatgccatgagttagctctttctccccctcctgccactggtcagctaagccttccccctaaaaatcactttttgatatagagggtgaagaatttccagtatctcctttagttgactgtgagagaaattagtgtaatttctaattgaccatcttcacagagttgtagaatgatcacagagcatttagaagctgtgggttgctaatagctaaatggctttgaaataatgaatgcttcatttgggggaactcggggtaactgtgacaaaccgttgttatgaaggggctttagctagccttggaagggcaggctggaggcttctgcacgtccttggaagtctccatccaccagaaggagctccttctgctctctcagcctggatgtgatagttgccagcaataggcgcaacttggtttttaaattaaaatctaatatttgatatacataattctatcaacaatatattaaaaatatgatttctgctttgcatctgctctttttggtacactgtgtgtcacatgatagatgccacattaatatctttgactattaatagagttggataagtaatacactgactcctttagcagcctcagcctttctttgaactttgcaaacatggccattgtaattaggtgttgttgaattgagaataaaagttactttaaggcagagctaaaagtgttaccgaggagatgctattttcagaaattacttggtaaagactcctctggagttgttagtaccgtatctcattataaagatgcctcttatatgtatttgagaagggaaagaaggagcccagtgttgacgttttatttagaaaatgtgaggccgggcgcggtggctcacgcctgtaatcccagcactttgggaggccaaggcgggtggatcacctgaggttgggagtttgagactagcctggccaacattggtgaaacccagtctctactaaaaatataaaattatccagacgtggtggcgcatacctgtaatcccagctacttgagaggctgaggcgggagaatcgcttgaacccaggaggtggaggttgcagtgagctgagatggtgccattgccctccagcctgggtgacaagagcaaacctccatctcaaaaaaaaaaaaaaaagtgcagtgcaggtgatccccaccgcccccacagcggtgctttctgcgggtgatccccaccgcccccacagcggtgctttctgcgggtgatccccaccgcccccacagcggtgctttctgcgggtgatccccaccgcccccacagcggtgctttctgcgggtgatccccaccgcccccacagcggtgctttctgcagggagcggacggcaggcctggggcgtgctgcccgcttacctcatgaactgcgcgtgcactgactccacattacccacacgtgggaacaatgcagcagatgtcttttttggatccggttgctgtgtatcgcatcgcaagacttttctggatccttcccaaatcctccagaagactctggagagcattggaagatgagagtctttcttgtgtttgagtccctaggctccccggagaaacccctttgggtgcacgctcaccttaggcttgctgtttgggaaaaccatggctctgggctggaattggtcacttttaggcctgggcactgttcacaagcttggccaatcacaagcactcagccttacacgcaggcctgtttctgaaagatagtttcaattacggggtcaatatcttaggtagatgcaaaaccaaaacagtgtataggaaataactcatctgttgaaatagtttttttttttcccttgggttagcaatcctgaagaacgttcattggcagaaccctttggcttgaatgtcaggatgttttttaaaaatgctaggttctgggtgggtgcggtgggtcaggcctgtaaccccagaacttcgggaggccgaggcaggcagctcacttgaggtcaggaattcgagaccagcctggccaacacggtgaaaccctgtctctactaaaatacaaaaattcgctgggtgtggtggcactcgcctgtgatcccagctactcaggaggctgagggaggtgaatcgcttgaacctggaggtggaggttgcagtgagccaagattgcgccactgcacgccagcctaggcgacaaagcaagactccctctcaaaaacaaaaacaaaacaaaacaaaacctgttggttctaatacccctaaagcaaagagctctcctgtgtactcgtccatgcacccagtagtgtggtgggaaagaaggaattcagcatgcttcctcctgggcctggcagacaggtaccaggtgagtggagcactgtcattgcctgtcacttgctgttggaacctctgcagccagagggcatgtcttcttgtctatacatcaacgtactttggggggcttcttaaataggtggggtttctgtcaatgatcacactgaatggggaaatgaagtttctagtaggcatatttgggataaagctctttctacatctacctgtccgactgctccctcggcaaccacagaatgcttccagtgtccagtgtgctccaggaggcattgggccaagcgcccgtgcatctcagggtgcaggctgagataggcacggcagatgcaaacccagcagcgtctggaccacgggagctttgtctctccaccggacaagacacagacttcttggtccctaaggaagtccccttcaaacctgctgagttctcatgtggctcctgtacactggagactcgccccaccaccccatgccatcctatgttctagtgctgacttggaagaaaggtgggttggtatgaaaagtgttagatttcagaagcttggcacaaatggttggcagcgatggagggactgcagtgtttagaggccatggtgggaggacctgttggatggagggactgcagtgtttggaggccgtggcgggaggacctgttgggtggatggagggactgcggtgtgtgtttagaggccgtggcgggaggacctgttgggtggatggagggactgcggtgtgtgtttagaggccgtggcgggaggacctgttgggtggatggagggactgcggtgtgtgtttagaggccgtggcgtgaggacctgttgggtggatggaggggctgcggtgtgtgtttggaggccgtggcgggagggcctgttgggtggatggaggggctgcggtgtgtgtttggaggccgtggcgggagggcctgttgggtggatgggggggctgcggtgtgtgtttggaggccgtggcgggagggcctgttgggtggatgggggggctgcggtgtgtgtttggaggccgtggcgggagggcctgttgggtggatgggggggctgcggtgtgtgtttggaggccgtggcgggagggcctgttgggtggatgggggggctgcggtgtgtgtttggaagccttggcgggagggcctgttggatggagggactgcggtgtgtgtttagaggccatggcgggaggacctgttgggtggatggaggggctgcggtgtgtgtttggaggccgtggcgggaggacctgttggatggagggactgtggtgtgtgtttagaggccgtggcgagaggacctgttgggtggatggagggactgcggtgtgtgtttagaggctgtggcgggaggacctgttgggtggatggaggggctgcggtgtgtgtttggaggccgtggcgggaggacctgttgggtggatggaggggctgcggtgtgtgtttagaggccgtggcgggaggacctgttgggtggatggaggggctgcggtgtgtgtttggaggccgtggcgggaggacctgttgggtggatggaggggctgcggtgtgtgtttggaggccgtggcgggagggcctgttgggtggatggaggggctgcggtgtgtgtttggaggccgtggcgggagggcctgttgggtggatggaggggctgcggtgtgtgtttggaggccgtggcgggaggacctgttggatggagggactgcggtgtgtgtttagaggccgtggcaagaggacctgttgggtggatggaggggctgcggtgtgtgtttggaggccgtggcgggagggcctgttgggtggatggaggggctgcggtgtgtgtttggaggccgtggcgggaggacctgttggatggagggactgcggtgtgagtttagaggccgtggcaggaggacctgttgggtggatggaggggctgcggtgtgtgtttggaggctgtggcgggagggcctgttgggtggatggaggggctgcggtgtgtgtttggaggccgtggcgggaggacctgttggatggagggactgcggtgtgtgtttagacgccgtggcgggaggacctgttgggtggatggaggggctgcggggtgtgtttagaggccgtggcgggaggacctgttgggtggatggaggggctgcggtgtgtgtttggaggccgtggcgggaggacctgttgggtggatggaggggctgcggtgtgtgtttggaggctgtggcgggaggacctgttgggtggatggaggggctgcggtgtgtgtttggaggctgtggcgggagagcctgctgctcagttctcaggactggttagaaagtaaatttaacgtaggagcaacttaacaaaaagaaaagcttttcattttgggggctttttttgtttgtctttagagatggctttgctctgtcacccaggctggagtgcagtggtgccaccacagctcactgccaccttgaactcctgagcccaagggatcctcccacctcggcctcctgagtagctgggactgcaggcatgcaccactacaccaggctgattttaaacaactttttgtagagacaggggtcttgccatattgcccaggctggtctcaaactccagagctcaagcaatcctcacacctcagcctcttgagaagccaggactacaggcatgcaccaccacacctggctaattaaaaaaaaattttggagtgatggggtctttccatcttgcccaggctgatcttgaactcctgggttcaagtgatcctcccacctcagcctcccaaagtgctggtattacagatgtgagccaccacacctggttatataaaaagaaaacctaaaactagtaaaccacactgatattttttgctatatttctgctatatacatgtccttttgaaaaggaaaataggaatattgaacttagtttttgcgtaaagggccatttcctcccacttaaagttgtttcctttttaatcctctgccagccattcttacgtggccagtggtagtggtgctgattaaaataacacaagtctgccagcagtcccagacagacatcgcaaatggcgccttccacagttcaggactgtgtgcttcactccacggaggtctgcctcagatgcctccctcccagcccctttccggaggccagggagagtgcgtttccaccaagcgcaggagtcagcacttcctcatagccttcccgtgccctcccagcaccaggcacacatggccgctcccacctatcccatccacctgttgtgacgcgggtctgagtagctgcaggtccacgtcgttcctggacccatcatctggcttagtgggcctgtcacagcagacctggaaactaattttctgtgtacagcaggttgcattgccgatgctattttagcttatggagcccagagcccaggaaatggttttaaacatgattttgccttccctcttccctcttgtttaaaaaaacccactccttggtggttcttggtgattgttgcgtggcatgtaaatatccctaatgtcaccgaactgtacatttgaaacagttaacatggcaaattttatgctacaggtaatttatcatcataaaaaaaacctcattcctctagaaattgcagtttttattgaaaaagttaaattatatttattattaagtatatgagaatttgatttgtactctgggtttaatgttcctgtggtagaatgggttattaataaaactagcagtcattagtaccttccagctgagaaatttgagatgttaaaaacaaagtttgtcagagtcagatgacagtgcgttctgtaccatcaccgtggtgcgaggtggctgtgagtgaatacagctctgtgtgtatttcattccgaaagcactgggcgtgctgtctggagagggctcggcagctttcgtgttggcgtcgtaggtgcttggtggagattcagaaggacccagatgggataatggggcaaaagcagccctaaaatcaggggcagtgcccggcactctggacgcatgtgctggcccagctgcagggcagtccgtgtcatctttggggactctgtgtcctcgtcgtcacagctcttttaacatggagctgaaacctcatggggttggtaaaaagcagatgaaatagtatatgtgaagagccgtgagaaatactaagaactacgcaactaaaagtaaggagcaaggaaggagcaaaaatgcagacacagacacattctctccccgtcaagccggggagcgcatcgcagccctcggtgattaaaagccacacactctggacacatctcacccccacccatattcatcgtcacttacaatattcatttacaatagcgcctcctcttcatggaggcctgccacagtctgagtaaacaaaagtgatcttgtccctgtggtattcacaaaacaagccctaggaattgtgtaagtcacaaacagcgtccaggccctggatctgggacgaccagtctctgtcatgcgatgctccagccctcatgctgaccgcttggtccacgaccccgcattagcaggtggcgctctcagtctgaagcctcattctgtaccttgttgttccacatccccagcctagatgggcagatgaggttggcccctacagcagaatgctttccattacagccgaattataggtatttgtagacacgtgaatgaaggagttctgcaagctgtgtggcccggtatgatcggcatttttggggttttctgttttcattcctttagctatctacatgacatgcccaggcatcacatttcagggtaactgaagagaaggcaatgcagattccatctcacagcctgtggtgtgttcttcttgttttgtctgttccctgtctctttctgtccctttgtttcctgctaccctttcccctctcccctctccccacaacaaaggaccagccttgatgatagtgcaggagggactttgcaagccaagctctcccagggcccatggggcctcccttccagcaggtgggccctgcatgcagcccacagtgtctgaggactctgcatccccggaagggaggcattgcttgtgcgcagctgctgtgcctcccccagctgaaagcattctgtttggtggaactggttctgatattttccagctcttctcaattatttccaggagcaggcagagcagtgtgtgtacataatccctcatgtgttatacttattaaattttactggccaaaatgccaggaattcttgtgaacttcattatttctgaaaacgacagcaaaacctcttgtggattaccgaaatggccacatgcaggcaacgtaggtagccagggaaaggaatcacaatctcagtgctagtataattagtccttggtggtataaggatcctgttttgttgaatgctgtggttttttggtaaaacaggaacccacctggtatccatggcagggtatagcaaactcgtgtatcagacagtcctgtcattttttaaacctttgaatgtaatgcattatttaaaaagaaggaagagttacactttcagttagatttcatttggtaaaaagtgaaattttctgtgcattttagtagtaaacaacaattcacttagtgcctttcttcctaaaatggcactgtgatatcagcttcacatatgatacttttacgtgacaagtctcattgaaataaataccaaccggcattactatccctactttaaagagagattaaattttgaattcaaaaacacctcacctttctccctgattacaaaattaatgcacatttgtttgtagaacatttagagaaatccgatgaagatgggaggagataaaatccccctaatcccccactcggggatgagtgctcgctctgtctgtttttcagtctcttttgatgggtcgctttagtcagcccactcaaactcacattttgtggtttgcctttgtgttggtgatggagttcacatcatataacctgaacgtcttcccatgtcattaaacacaacaaaataaggttaggatagattaagattgaacgtttaggccgggcgcggtggctcacgcctgtaatcccagcactttgggaggccgagacgggcggatcacgaggtcaggagatcgagaccatcctggctaacacggtgaaaccccgtctctactaaaaatacaaaaattagccgggcatggtggcgtgcgcctgtagtcccagctactcgggaggctgaggcaggagaatggcgtgaacccgggaggcggagcttgcagtgagtcgagatcgcgccactgcactccagcctgggcgacagagcgaaactccgtctcaaaaaaaaaaaaaaaaaaaagattgaacgtttaaaacaaaccgtaagacaccatgaaagacctggtggacagtgatacaatcctggggtaagtagggtcctgcaaagaggaaaaccgggaagaaaacagagttgacagagacacaaccaggctgtgccatcagaagggccttgggaatgagacggccaggtttccaggcttacagtctgtctctggagacagttcagcagcgacgcctctctccagaggactttccagtgaaaactcacagcctgagttgatttattctttccttctgtgttacagctgcagcttactatttggttgtgaccagcagctaaatcacactctcttttcccgaatgttctgcccttcaggtagctgcaatcaacccaaatcaccctcttgctcagatgcctttgcctccgtcgatgaaaaactgcatccagctggcagcctgcgaggccaccgagctgctgcccatgatccccgacctcccggctgacctattcacctcctgcctcaccacccccatcaagatcgccctgcgctggtgagtggcccctgctgtgcccctgggacccactcaactgggctctcccgcagggaccccaacccatgtgggccccaggcattcacctggtcccaggagcccacgtgacagacatgagtgtccccgccttctttttgtgtcattcgggattccaggtggaggtttgggttctactctttgagagctcaagatccttcttccttctgatctgttcgtgggcagctcactgctttgcgatttccaagaacaccctctccttacctttgttcactgcggaggcgtcttagtaccaggataggtcatactggaaactggactttctttcaggggaagaaaaggctgttatgaaaaaggaagtcatttaattccttgcttgagttgaagcgtaatctttcaatgtatttttagcaatgaaaaaagagccatgatttttctgtctccatcctttttaagttatagccgtcgggaacataactgaagaaatgtgtgtgatattccaagatggtagaagccgcatttcagccccaacatccccagcagaacgcacagtgggatatgtgtgtttcctgcctccaaatccaatattctcccctagaccatcttgccagtctttaatatctcctttcccattttatgttttgctgaaaagcttatatgtcgtggctgttaccggctagtagataaatacctctcccttgaggtgccgtgcgaatggtgcagctgtgcagcagacaccgtgctgtcggccgaggacactcttgaggcttctgtcaagatggcctaacactctagacaagtctcctgccttctcacccacagccctgggcggacacggggagctaacagcacagcaaagtaagggcccccagggacaccctgggaggggccagaggggcagggcagcctgaggggggaggaaaacttggccttcctgctctgcctctgcagccaagtccaaattgatcccagaccccagggctgggggttcatgatgttggggtgactgcagcgcagccctcacattaactgtccctaggcctccccaccaaacttgagggctacaggtttccattcagggagagacctccttttagtgttactcaccccaaaatagttggagatgaagggaagagggctgggtgtggtagctcacacctgtaatcctagcactttaggaggctgaggcaggaggatcccttgagcgcgggagttttgagaccagcctgggcaacatagggagaccttgtctctaaaaagaaaatagaaaaatagcaagtgcagtggctcatgcctgtaaccctaatgctttgggaaggtgaggcaggcagattgcttgaggccaggagttcgagactagcctggccaacatggcgaaaccctgtctatactaaaaatacaaaaaaattagctggatgtggtagcacatgcctatattcccagccacttaggaggctgaggtactagaattgctcgaacctgggaggcagaggttgcagtgagccaagattgtgccagtgtactccagcctgggtgacggagcaagaccctgtctcaaaaaaaaaaaaaaaaaaaagaaacaaaaaaagaggggagaggagctgtctggagggggcagcagagagggatctgcagtgtttctgctgtccagccagtacccccaccttacctggctgatgcagacttagcctgaaagggccactgtcctctgcacccagcggagcagagctcacttggcaaaactagacacctgagtagcacagccactacgcagagagaaagctgaaccagggttattgtaaaacaagtgtaatacatacaatcaaagaaataaaggaagacacctgtaacaagatgtgagaacaatgctacagttttaatgccttcccccaaatgtatgtgctggaaacttaatcccccacgcaacagtgttgggaggtgattgcatcatgagggctctgccctcacatttaggttaatgtcactgtcacaggggtaggttagttatgtgagagcaggttgtgataaaagcaagcccagccccttgtgttatcttgcccttccaccttctgccatgggatggcacagcaagaaggtccttgccagatgccactctttgaccttggacctcccagtctccagaactgtaagaaagaagtttctttacttagatgaagagaagctgcttgaaaagtccaagaatacagttaagtaggaggaataagttatagtattccatagtagagtagggagattacggttaacagaaataatttattggatatttcaaaatagcttggagagaagaattgtaatggccccaacacaaaagatagaaggtggagtgagatggtggaatagaagcctccaccagtcttcctgcagcaaggataccaatgtaacaactatcagcacacacagaaagcaccttcatacgaaccaaaaattaggtgagcgctcatagtacccagtttagcttcatgttgctgaaagaggcactgagaggtagaaaaaacagtcttgaaaagataaatgtttgaggtgatgtatgagttggatagatcccagttaccctgatttgatcattacgcattgtatgcacggatcaaaatatcacatggagccccaaaatacatacaactatcatatatcaatttaaagaatacaaaaaaaatttgttataaattactcagtctgtcgtagtctattatagcaacacaaaacagacagacagacaagaaaaagtactataaaagaagaacaaagcagaaataggggtaggtgcactgtaatgtttgaaataaagaacacagtagacaggacccatagcaggagagacactgctggagccaaatgaatggcctggaagactacagtgggggctcacaggaggccatgggaaagggtcgagatgggaaacagaaaagccaggagatgcagagaagggaaatagaggccccagtatgcagactgggggcatcccgtgttgagagaacaagaatatggcagagctgaaaatacctgaagatctcggaaatgcactccccaaaattgggaaagctggaagccctccaactgagagggcttgtgccaaccagaaattaatgggagacctccgacctcagcacatccagtgaggcggaagaccctcttgagggcaccttccctgacgccacgttgtttctgaactgctctccatccttgtttgtttgctctgtaatgtcgaagtcctttctgaacgcagatctcttttcacgtaccagtttatgaggcacacgttacagtgtgcctacctctatttctgcttgtttctcctttcgcattactttctcttgtttgtcttaatctgttttgggttactataacagaatacaacagactgggtaatttaaaatgacaattttttgtattctgtaaattgatatatcatagttgtccatatttggggggtccatgcaatattttgatacctgtatacgatgcattaatgatcaaattggggtaactgggatatccatcacctgaaacatttatcttttctttttaagactgctgaagagacggtcttttggggcctctgtttctcttctctgcatctcctggcttttctgtttcccacctctgtcctttcccacggcctcctatgcgcccctcattgtagtcttccaggatattgtagggcttcagcagcctctcacctttatgagtgttctttttaactctctgtactgtatgtctgatccctgtccaaagaggcttatgagtgcccatttcacgttaccccaggaagagattggtccacctgactcaggagttcatccattcattgcccaaaaactaatttattcagtcccgactgtgtatgtaataagacccatgctaatcactataggagatcctaagaagcatattgccctcaacaaatgtctcctctggttgaggagataagatgtggcttgaaaattcatgatttcaatggatgcttcatgcaagatgaaaatctgaacccttcaaggcaatgtgtgatcaaagaccaagtgaccttatggcaccaagggctgttgtgttcccagaggacagagaaccatggctaagggccacagggtttgagaaagctgcttggaggaggtggaacctgagaggaaggtttcgtcaggagtgcggttgagctcagagagtggactgaagtccaagtccattgtggggtgctttgaatgctgcccagaggaccttgacttctcctgggactctggcacaagagagcccctgaagctgtttgggtagaaaaatgacttcatcagaaccgtgttttagaaagaggatccaagtgatgatagggagaccttggtgaccattaggccattatcatatcagtgcggtcttgagctggtaaaagattagggcagaaagatagaaaatcacccaggggcctgtaggctggagcttctgtagacgcacagtggacactgccgagaaacaggcctcatttctcccatgttcccgtccccgctcccggtttcctgcatgactgctttggtgccccctgactccagaatcaacaccacaccagctctgcctttagactctgcccagaggctctgggctggatactgtatttggtgcgaccctctggggcatttttgcaagttttcaggcagatgggtgggggagcagtgaaggaaggaggaaaaaagacaaagcacaaggggaaccggaaatgacatcgctaccttcctgtgccttccctgccgccccactccagctacctgtcactaaacccagtgcacttcatctagttgacgggtttctctcaggcattttgtttttctgccatgagtgggaaggacttggcttccctccgcgcacagctgtgcactcccaaagacgcctgggccagatgtggcagtgcgtcctgtagtcccagctgcttggaaggccgaggcaggaggatcacttgagcccagaagtttgagaccagccctgggaacacagggaaaccccatctgtaaaaaaaagtaaaataaagaagtatgctttcactctgagggctgctggcctcgttatttctaaaatgggtgcctgccctctgagtagggaatgtgctttctctctaccaaggcatgatgtgtcatcccagtagcccctgaaatccttgtaggagttaggacatagtcagatttttaaaagtaagcatttagtaggaagtgcagtgaaaaacaaactgatacagttaccataagagggactttgaaatcaatatgccacagtggcagacagtggtcatcagataaccactgcctggaacaattgagcggtgtctcaggtggcggctcttttacaataaactgctttctcccatattgaagtgctgaaattaggttgaacatgacattttgctaggtgtctatggcctgtgagtggtaatggactatattcattaaagaattatcaagtgaaatgtgtagttttgtgtgagctaagttaaaaaccaccagggtttttttttttaatggaagagtgagatagtttgtcagacagtaattacgtatgtttttagggttttagttttattttttcattttgaaaagtcaatttttctaattaaaaatgaaagatacattcttttcagaaaattactaaaaagttaaaagtagaaaaaaatcatccaagattttaccatctaaggacaactagtgttcactttttgatgtattgcctgttggtcttttttctgtgcatgtacattttgcactgatgtaagtggacagaatttacgatttcatatccttaacccttcgcattatactagagttccctgccctagatcattagagactcttagtaagtatcattttatatttcactatgttgaagttccatgttttatttagccggagcgtagggctttgggatttaggcgccaggagtatgcgggtgggaaggttcagcctggcactctgatgggagtcggcagacctggttctgtgaaggggcagacgcacttgggttaggcttttcgggccacacagtcccaagtctgctgttgcagcacgaaagagccacaggcaatatataaacaaatgagcatggctgtgttccagtcgagctttcttttttcttttttcttttttttttttttgagaccgagtctcactgttgcccaggctggagtgcagtggcgtgatctcggctcactgcaacctccacctcctcggttcaagcgattctcctgcctcagcctcccgagtagctgggattacaggtgcccaccaccacgcctggctaatttttgtatttttagtagagatgagattttaccatgttggccaggctggcatcaaactcctgacctcaggtgatccgcccgcctcagccttccaaagtgctgagattacaggcacgagccaccgcacccagcctcagtcaagctttctttaaggaaacaggcagttggccagatttggcccaggagctatagcttggcacttcctgctccagaaaagggaactaggattgggctgcagatgacggctgtgcgtgtctgccggtctgcaggtgacctggagaagggcgatgctcgggaaggtggattccctccctccctccctttactatgtaaataagagaaacggtttctaagcacgctgccctcattatgctggcacagctgctacagaatgcggtgtgctgggtaaacaacatacagctttgcttcatttggacaaaatgtgtacatgtgtacttggtggcaagcgtatttatgaatcttatttgatgatgaacttgttggaagacattgttctctaattttttttcatttttgcctgtctttttcatttttggaaactgatttcaataattccaaaatgagcaatgacattactttccacataaatgattatcttactcaccatatacatcaatacactgtaagaatccaaaatatattttttcccttggctgttttctacttctttgattgagtggcataatatcattttagatttattacgcgtctatttgtatactactgaaaattataacccagtgggacttcatttgctgtgggacttgctataaaacagattgatgtctattgcactgtgctgcatgcactagtattgtctattaatgaaaatgataaacattattttggattgaatagaggtcaaaaaacttacttcctttctttcaattaagttgaaggatttccaggactataaatgttaatgatagagcattaacgtgtatttgtcagcgtggaaagtttcgctcctgcattgcccgcaggagacggaagatgcatgggtttcctggcgcgcaggttgggtggaggctcagcgtggctctgtctggccaggctaagtggtttgcagtgcctgtctcatttcagacatttgctgtgacatttgcttcgtattttttcctgatgactcaaccaagaatcattcagaattacctttagaaacataaattcttgtggttttgatgatagagttaaccatgtgttctccaaggagtcttctaaaatacatctgctttgccagagaacacactttcttctgcccgttcagtgctctcgggtcttttgccgcttcctttcaacaacagtccgatgactttgtcttcctgcatatgtgcgaagggagaggagctcactggtcctcccagagggtgaagtaaccgggacacattattgaataaaatgctcttttgtagtatcccactctgtatcttagaccttagtcgtaggcaagtttaatttggaatttgcgtctggagaaacggctttatgacgtttccaagtagagcctcagtatcatggatctcacacagtccccgcggcagcttccaggccgtttccagaggaaaatattttttctccccaaacaagacagtgttctctcactgttccagtctcttgacatatactcaattaagatgaatatcataatgtattgtaatagagctcccgttttaaaagatgacgtgtaaaaaccacctgatggatgcggtaagaaagggaattgaagcagatggaggggcacgggctgctgactccccggctgaaccccgtcctcgggtgctgcaggaaagagtgagattgatgatcctggagggagcccactcagcagcacagccggagactttgctggtcccttgagatggctgagtccccactgggggctggggtgaggggtgaggccggaggagacagtggagctggcgagggccccagggtgcaggcaaggctgagggcactcggctctcctcccactgcccttgataggcatggcctgctgtgctgtgtctggggctcagaaagatggaaaataagagggtggaaagaaagagtttgtcctaccgcccttgtgaaaagagaagtaatccaataataaataaaagtgataaaagacaattggaaatatgaagaagaaacaggaagaaagaccagttggaagcattaagtataaaaaatataattggtgaaataattgaagagatggattgaaaagcaacattatggatagagccaagaataaaccaggaagctgagaagcttgtttgaggagttcccaccaaagggatggagctagaaggaaggggagaaacatgagaggcagagacaaagtttaaatatctaggaaataacattttcttctctctaaaaaaaaacgtagaaaaggagaaaagacaggcttagtaaatagaaagtgtgagatacgatggctaaaatgttttgaaataaagttgtaactgtaaacgaattgaattcacctctcaaagggccatgattcttgtgttggttaaaatcatgatacagcagtctcttgtccatgagacacagatttaaagcaaaacgtttaagcctgggcaaaacagcacgaccctgtctctactaaaaatttaaaaattagctggacatggtggcttatgcctgtggtctcagttcctcgggaggctgaggcaggaggatcagttgagcccaggagttcaaggctgcagtgagctgtgattgtgccactgcactccagcctgggtgacagggtaagacccagtctctaaaaaaaaataataataataaaaaataagaacatgtatttcaaaggttggaaatcagaagatgaaaaagagaaatacgagctaaaagaaagctggggtggccagtcccaatatgacttaaagcagaagctgagataaattattgagaggggcaaagaaaaatgttgtattgtggtaaaacgaacaggaaagcaggaaggtatatactgatgatgactgtgtgcacctgacaacgtggcctcgaacgagataagatgggagctgaagtgtggatggaagcagatgaatgagaagtgtgcttagatacagagacaccaagtacagacaaaggaagcaacgtaaatacgacttttgtcaccgaattaattagccagacctcacagaggcacacaggaccatacatccaacagggaatgtggacatatgtggaccattcacaaaaataaatcatgcgcccgactacaaagaaagctttactaatccggaagaatcagcatcgtgtgaactccgtggcagaccacacgcaatgaagctagaactcagtaacgaaaggacagctttaacaaaagtctgaaaactaaaatcttaaaatccttggattaaagaggaaatattttatattttttatttttttttacatgtacacacttacacatttatttgacttcattgtagaactttgacattaatcccaataactaatctctttatacatattgtttcatcctgacatcaacctgaacagggaaaattgacttatataagcacatagctactatagatgtctttttagaaactgattattgatatatagcagagaaacctaaaatctctttaactaacttgaagtcctgaccgtatgacttcttttgttattttattttattttattttattttattttattttattttattttattttattttattattatacttttaagttttagggtacatgtgcacaatgtgcaggttacatatgtatacatgtgacatgctggtgtgctgcacccattaactcgtcatttagcattaggtatatctcctaatgctatccctcccccctccccccaccccacaacaggcccagagtgtgatgttccccttcctgtgtccatgtgttctcattgttcagttcccacctatgagtgagaacatgcagtgtttggttttttgtccttgcaatagtttactgagaatgatgatttccaatttcatccatgtccctacaaaggacatgaactcatcattttttatggccgcatagtattccatggtgtatatgtgccacattttcttaatccagtctatcattgttggacatttgggttggttccaagtctttgctattgtgaatagtgccacagtaaacatacgtgtgcatgtgtctttatagcagcatgatttatagtcctttgagtatatacccagtaatgggatggctgggtcaaatggtatttctagttctagatccctgaggaatcgccacactgacttccacaatggttgaactagtttacagtcccaccaacagtgtaaaagtgttcctgtttctccacatcctctccagcacctgttgtttcctgactttttaacgattgccattctaactggtgtgagatggtatctcattgtggttttgatttgcatttctaaagaggaaatactttaaaactgataaaatactcacagccaaatgttagtaatagcacatttgctgtttgtggggtgtatgtagccaaagcaggcgaggatttaatacatttagtcagaaaacaaagattaaaaaaacaagaaaaattaaatgtttgccttaaagagccaggggaaaaatgcaataaacagatgaaaaacaaaatgaagagagcgaatctgaaagatacaggcagccctacgctgtccgtcgcatctctgcatccatagggtctctgcttcatttcctgggagtcctgccagtgtgggagggggcgtccagggcctctgaacactcttctcacagattttcatctgggcacttgctctcagttcttcttttcagagagccagttgtctcagttcttgatacttgctgacagcaggctttgggaggtgagtgcttcattttgactttgcaccgtccaggtcaaaggcttcacttctctcacctctgctgagccacttacgcttgtccaactgtttcttaacgtttggttgacattttacagttacagggataacagtagctagcatttgtcgagcgtcactggagccattccactaatgcactcatctaacaccacacgcctgtaaggtttggactggcgttagtgctgctttcaggatgaggaagttcaggttgcttggagagtagctggtggagtcaggattcaaagctgggtgcccaggctcccgaactgacagcctcaactctgttgttccgcctctctctctcctgcccagcgtctctcatttgccatgatttccttcctggggctctccgtccttgtcctgttctttttctctcgttatggaggaagttgagatcactatcatctatagtctgtcacgtctaaatagaggttaccacgacttacttaacgtggtaaaggctacatcagagctcttcagcaaaccagcctagtggggagactggagacgtcttcccttcgaagctgggaacaaggcaaagattctctctcgcactaaaacagtattagaattcctgacccccagtaagataactccataaccagcagaaggaatgtgaacatttgtaattatctgtttacagtaagggccatctaacatagttcactgattctagcatgtactttttaaattttttttaagacgtgatcttgctttgtcacccaggctggagtgcagtggtgtgaacacggcccaccgtagtctcaacttctcgggctcaagcaatccccccacctcagccccccaggtaactgggactacaggtgtatgccaccattctgactaatttttgtatcttttgtagagactgtgtcaccatgttgcccaggctggtctcgaactcctaagctcaagagatcctcccacctcagccttacaaagtgctggaattacaagcatgaggcaccatgtctggtccttttttaaaaaatagagacagggtctctcccttttacttagatgggagtgcagtgacacagtcatagctcactgcatccttgaactcctgggctcaagtgatcctcctgctttagcctcccaaagtgctggaattccaggcatgagccaccacgcctgatcccagcatgtgcgttttcacacttaacatatctggggtccagaagcatcttacaataagtaacatacctgtttagttggcagttcttttcctttgttaatagtgtatagaaatgcttgcaaaggtccacctagaggtgtgcactgtaccctttcttactgctgtttgtaagctcactgtttgtcactagggaaagaaacaggcaccattacttaactaggtgttcatgtaccggcaataattgatctcaaaatttaatgctatttgtagtttttaattaaaaaactctcaaatgtatggtctaagtttttctttaagtccagaaaaaaaagaatacattaaaccctaagtaagtagaagaaaagaaataataaagagaagagcaaaaataaacagaagttgaccccaaaatttgtaaaaattcatgaaactagttgatagtttttgaaaggttcattaaaattgtcaaaactttttctagagtgctcaagaaaaatagaaggaagatacaaatgactttcatcagaaatgaaagagggcacatccttactgatcctacagatgttaaaagaataaggggccaggtgcgggggctcatgcctataatcccagcactttgggaggccgaggcaggtggatcgcttgagcccaggagttcaagaccagcctgggcaacatagcaaaaccccatctctacaaaatataaaaattactcgtgcgtggtggcatacgcttgtagtcccagctacttgggaggctgaggtgggaggatcactgggaggcattgaggctgtagtgagcagtgcagtgatcacgtcactgtggtccagcatagaccacagagtgagaccctgtctccaaaaatgaaaattataagtaaataaaaggagaataagggaatcattttaatcatgaaggaccatatgccagtaaattcttcatcttagatgcaatggataaattctgtgaaagacacaagttatcaaatctgacagaagaataaaaagaaaatttggataggatatatctgttaagtaaattaaatttctggttaacaaccattcaaagacaaccccgcacccagatatctttactagtgaattttaccaaacctttaagatgaacagaatagacagacaacctttgtgaaatgtttaaatatctgctgaccatattaagttgctgtcccaaggctcggtgtaattagtaatggtaaaagctaagaaaatctttacaaggttactgcctaactgttgactaatttgaccaaattttatgcacctggggccttttacaaatcagcttacttccctaagaaaaagtgttacttgaattttttttttatgattttattttattttattatttttgagacagagtcttgctgtgtcgccaggctggagtgcagtggtgcaatctcagctcactgcaacctctgactccctgtttcaagtgattctcctgcctcagccttctgagtagctgggattacaggcacgtaacaccatgcctggctaatttttgtatttttagtagagatggggtttcaccatgttagccaggatggtctcgatttccagacctcgtgatccgcccgcctcggcctcccaaagtgctgggattacaggcgtgagccaccgcgcctgaccacgtgaatttttttttaagagcagcttgcctttatatttttggttcacgttgggacttaccttctagtcatttactgttggctcacatttcctcttctcccatgtctgtctaacgggagaaccatggagtgcgtgatctcacttggggtctcagtaggccgcttagtgagtcccaaagacttttgtgagagtttgaatgcatccgtgtgtaatgtatctggaggactcaagggtagcaagtatacacagagtatccttttaacataaaaggagcattcagaaaagaattaagactgtgcagttcagcccacagttgggctctcatagctactgagttattcatgtaatcctcggaaatcagcttgggtgaaatactgcacgggaaagagtgctcagccccggcctcactcctgcctgtcccaggcctcctcactgtccgtgtctcatgggaagaaagtcatttgttgtctcctgcttgatgtcatcatcactatgttccagattagcttcaggacttgtttgaaatcatacctactaatcgactgacttatatccccatcacacggtgacatattaactgcttatttgcctctttgtatcttcttcttaaacttctgggcattttagtggcagtttggcttcttgtttgatttatgtgcctaagcgtgctcatgcctccatatttaatcagtgacgttaggtcacattgcatgcaaaaactgtcagtgcattcagctccgtatttaatagcaggcattcatgacccttttttaaataaaaaagcgatcatttgatttgtgctaaactggacagtatattgcggaagccattttcatcctcattttacttgtgctgagatcgaatcgataatgcctcttgatggcatcattgttggaacgccagaaccgtgctgtcacatagacctgtatggagggtggcatgtgtcccacgccagagccatgccatcatgtaggcctgtgtggagggtggcatggtgtcccacgccagaaccaagctggcaagtagacccataaggatggtggcatggtgttgccagccttgttgtaaaatggtgtgaattaatccaggagacgttagcctcttctttggtttctcgttatttgtactgctaagtaaatgttgtatatgtatgttcagtacatagaacaatttaaactggattcagaagccatttcagtgcactctgagactgggcattaaaccttgctttaagtactgtcaccacagtcactgagaacagcccgagtgctgcttacttgcaggttgaaaggactctgtgcaatgagaacttctgagttcccatcctgtcccaggtagccagtaaacacctaagtcatgaaggttatgagacacagtccctgtgtgcccggaaaagagggtctccagggagaggtgctccctctcatcagtgctcttcttggagacagaggagggagtagggatactccttctgcttgccttggaggcagaggcggcatcactgctgttggggtgtcctcgtatcacccgctatgatgagtgaaatttcaccagcaagaggaggtggagaaaggcattgtgaggcactcaccctgacctgctcagaggcctgaacgcatctcgaccagcagcccagtgtggcatctgagtgaaggatggtggccaggacacgagagggagggcggggtccgtgaccatgaagctcgagctggaatttcttctgttggcagtgccttctttgtggtaggtgctgtgcagctgcagggctggcctggcctgcagagccagtcacacgggggtctccacccttgtctcagcccactagtgctgctgcacaggcccctgaaacagggtaatttataaagaacagagttatttctcccggttctggaggctggaagtcccaggtcaaggcatcggtgggtttggcgtctggtgagggctgttctctgcattcgaggtggcgtcttttcccgtgtcctcctgggaggactgctgcatcctcacatagcagaaggcagaaggcagcagaggctatgttcctccagcacccccgccttaaataaggttgctaaaatcccactcaggatggcggagccttgggatgtaaccgtcatctaaagcccacctcttagcactgtcacttcgggtcctcagatccaacaggaattttaggagggacgtgccttctcagcgtagcagccctctgggaaatgaaagcctgtttgagaagacatgttcgtatctcagcagcagcgtggtccgggctctcctgaggaaggtgcccagggcatttggggacacagaggagcaaatttcatccagcaggggcagctcactgtgtgggtgaggcttagaactgggcatggcggtggctgtcggatggacatgcaggttcaggatccaggtatgtctgtcacctaccatttctaatggaggacaacgatatcatcagttgtgaacacatcttctctgttactgttcaagaagccatgctgtttgcattctctaagaggaaaatcgcactgctggtagcaccttcaacctgcaattcctacttacccgcctcaaacgcttcctgtcttcacttttgctgtccgcaagatccccaccttccaatccacaaatgtttgtactcaaatttccccagcagaaccagcaataaagcacagaaagcagctgacctaagcccacccacctctttccttaaatcgggcatcttccccttagacagagtgtctggtttgcgctgctgtcaccactcagcttctcccagcatacagcgtgtgctgcctctcctggcccggggcagtcccctgccttcctgccattccagcagctctcccggaaccatcgaggtgatcgctgccttctgagccgtcagcctcactggcctgtccctaatccttgcccctgaagagtccgctgcagagctgaagcaagggacacccccttcagcacctccttccctgccctggggtctgcggctgcctctctgaagctcccactctctggccagcctctcttcctgcacttggacgtatgttctcccacggctgtgttcttggccctcctcttgacgtacttctgcctgtgagaaactgcagctcatccagcgatcactatcctgacccctctgagataatccctccttcctcacgctctccctctgccagcgctttcctcgtcatatacacctgcataaacctctcatgcctgaaacaaaaggtccaccccagcaagagggcactcccgccgcccgctggccctcctgggcctcattgcctagttctttctctccaggtgcagttaagcttcaggacggaagggggtacctcccaagcctttctgcccttcctgtccagccctcaatattgtaatcaggtctcctcaacctagaacgccccctctccttcccagccccaggtgtttaccctggttgtttgtgtttcttgtttttctgtgtaatggaaggaaggtatcacctgagaggccttaggaatgacacaggaaaccctgctgcctccattcagacttgggtggggtgggggtgggtggaggccagctggcatctcccaggatttctgaaccctcgtgtccctcagccagccaccgccatgcccagctccaggcctcgcccccgatatgggggaagctgttgctgctggatctgacgtgcccgtcttctcgctcgggcaccccagctggtgcgtagcgaggcagtcacagctcactgcagcctcgacctcctaggctcaagtgatcctcccacctcagcctccctggtaactgggtctataggtgcacaccaccatgcctggctaatttttcacattttttgtagaaatggggtcttgttatattggccaggctggtctttaacttctggcctcaagcagtcctccaactgcagcctcccaaagtgctgggattacaggcctgacactaatttctgcacatagaggtgaggaggcacctcgggtatcagggtagtgaatgagtgcctggaccacacaggccagagtcgaaatctgttcacctgccttaatctgccactgtttggctgcttttaaaaaataaatgtacatctttgtcttggattgtcttccttaatatcacatccaaaaactcaatactagcaatttttcagaagacctcgatgttttgggcagcccttagacctccctgtcacttgacccaaatggtgctgggttgaccccagtccagcagggaccaccagtgctgtccccaacatgactggttccccctgtctctccccccacatgcctggacccccttcctctccctccacatgcctggacccccttcctctccctccacatgccctgttccccttcccctcccccccacatgcctggtcccccacccctaccctccccgcccttgtctggtcttcagtgcctccctgatgaggggcagctgcccccattctcctgcggcagcttcaccagccacacggctcatccaatggcttggaccttgtttcattcactaaagcaccagctctagcactgtgaggtcattattgagtttgtaagcaaaaatcttcttaaggaacagactaatgtgtatttaattttcattatgtaccaggtacatattaagactttttgtttcttttaatctcagtaattcctgttttatagttccattatcctcatcgtgtaagtgaaaggtaagtggtggcagccggacatcaaggtgtgaactcgcctggggctgtacaggggcagagccagggctacgatttgaaccggggttttctgacctgagcgctcttctcttcattaccttctgcctcctccttctcaccacttaagtggcttcatgcatgcagggcttttaaaatgagattttctcaaagagccgtgtgtctgcaggtggcatgcgctggcactgggctattgggaggcacagagttgttcctgggtctctcccactggagaaagcagtgtgtttggctgagccagtgacacagggctgcccgggagcggcaccaccactcttgggacaggtgggcaggcgctgttgatgtccctggatgttgtcccttcacctgcagtttgtcaccaaagccccgagggactgtggtagagacacagctagtggggacttctctgttcgcacagagactctgcagttgcagctacatcacactctggtaaatagcgcctctggcagtgggttttaatatccacgttggttgttgaagcagtatattctaggggtgcctgggaagacagtcgtttaaaatgtctctgctttttataggtcagtttttcttcttctttctcactcccttgccaattgttggacttaaagtttgttggaaaggcccttcctttattttgatttgtgcctgtgctttgctccaaggcaggccactgggggcattttttacaccgaggacttggttggaaccgttaaccagtggctggctggtctgtttgtttacaaggcagccccgcagccttgttctgagctggctggctcctagatgttatttggatttgcttcctctggcaccaggccctcctccaggcaggcgcttgggcaggctggtgggactgatgggtagccttgctggggacgtgtagtcactgtggcgctgccagcaaactgttctttctggaagaggaacgcttggtgcctgggtgtgttcagtgtgttctgttgtgcatcagagctccctcagacgtcgaccgcttctgattccctccagacagctcccggtggacacgcagggctatgcggcctgccctgggggctatggtgctgaatcctgacaaaggccctcttctcgggctgtcagaaaggacgaggctgagtcaggctttaatgtaaaccatcactccctgtttttctatttcttcgttgaaagaagcactgatcattgtgttcactagaaacacctcaagtttttaaaaggctcctctcctgttggtgtgactcgagggcgctgtgacatcctgagaaagcggggactctgggagtctggatgtcaagctggtcccgtctccacccgccttgagttctcggttctcgacagcgcccgtgtgatgatgatgctcacgctccggtgtgacacagacggcgcgggagctgcacgggagagtgctttggaagtggaagccgcaatgtcatgtaagctgttgagtatgaattgtatcatatttcacaatccacagagtattctcccttatggtgtcacatttgctcttactaataacccaggacttgtcaaagcagacgtagtgcataaaacatcactgtgttactgatgaggtaccagatgctccgcgtgcggccgtctggggtggacagcttcatttatggcagagccaaacaggagcccggatcttctgatcccaaatcccgtattattttcactattccatgctgcctgccttcaccaacgtgagctgaagttattacatgttatcactttacttgatgccgtgccgtactttacacgagaaccagcttcccgttggggactttacagagctttcggcagggacagtaatgggggcggcccctgggaagctgtgcaaagtagcatttgcggcgccacatcccgcagtgtttcctgaggactcgctgtgtgcaggggaccgtaagatgccacagagaaatcaaggaggctgcggacacagtgtctgtcctcaagtcattcatcattccctttctctgcccctctgccgtggaaggttttcaagtaattaagctgcttgcttatatgcagctttcctccacgggccccgcctgtgcgtagtcgtgctctggcagagtctctgcaccttcctccctcgggctcctgggcctgtgtctgtccgtcctccactgtcttgctgtctgcatcttcatggtgtaagtctggcccctcagccgccccacaagcctggcccggggccaggcttccagccgctgcttcaacccaaaggtggaacacctgtttcctgcagtggagaagatgggaaagccttttctgcagggcttttactcccacttccttcttgttttcagccattttctctgtgctgtttttctcctttcttcctgagactttcccctttgacttgttcttagtcttctttctttctcttttgaacaggtagcggtcttgttatgttgcccaggatagtctcaaactcctggcctcaagcgatcctctcgcctcagctttccaaagtactgagactgcaggtgtcagccccatacccagccagtcttctcttttctttactttgagtttaggcttcttgagttgttttcttcttctcagatgcttcagggggtagctgagaatgttgaaaatactaaagtgcagcagaagcaaggaggcagagccagccctggtttcccactgatgatcaaatttctttttagctcagaaatactggcttatgcctaacccatcaaaggtgcagcattgttgggcacaggatgaaaaacagacagcccccacgtttggctgtcaaaccacatgacccagaaatagccatcattgtaagaaccccagagggagcctttgctatcttttaatttattgcacaaataatattataacagtaaacaatgaaaaggaagaaatgaaagaaaaattacccagaatccactgtttttgctattccatattcttcatacatttgtccatatatgcacataattttacttacttggaattaaatatattttgtattgtttttaatttgaagatcactgattttatattgctattgatattttcaaatttagtattccatcacatttatagacagtattacttaatcatttccctctcataaaattatagtgcttgcaaggagttttttcctgttcatctttgcggtacatagaaccttccttagctgtccatggtagcatgcagctgtagtctcagctacgtggaaagctgagatgggagggtcacttgagcccaacagtttaaagttatgatgagctatgattgtgccactgtactctagcctgggcaacatagcatagagtaagatcctgtctcttaaaagaaaaaaataataatattttcttattttggactatttcttagaatatgtttctgggaataagatcagtaggtcaaagtatatagctcttgatatcttttgccaaacttcctttttttttttttttttttgagatggagtctcactctgtcttcccaggctggagtgcagtggcgtgatctcggctcactgcaagttctgcctcctggattcaagcgattctcctgcctcagactcccaagtagctgggactataggtgtgcaccacaatgcccaatactaatttttgtatttttagtagagatggggtttcaccatgctggccgggctggtcttgaactcctgaccttgtgatccgtccgcctcggcctcccaaagtgctgggattacaggtgtgagtcactgtgcccggcgctgccaaacttctttactaaaaggttgctctaattacacggccccaaatcacacatatatgaaagtgtcattttcaacacaacattattttcagagagaaaatgttccttactttgcatattgcaggggaaagactgtattctgcaggtcctgtacgtgactgcaagaaaggaccagtattacaaggccagagacagagaaggccccacagtgacatctggaccgaccagtattacaaggccggagacagagaaggccccacagtgtgacatctggaccaaatctttttggtgaacccaagtgctgagttattgatcaggaagtgaagggggaggccgggcgtggtggctcacgcctgtaatcccagcattttgggaggacgaggtgggcagattacctgaggtcgggagttcaagaccatcctgaccaacatggagaaaccctgtctactaaaaatacaaaaattagctggacgtggtggtgcacacctgtaatcccatctactggggaggctgaggcaggagaatcgcttgaaccagggagtcggaggttgcagtgaaccaagatggcatcattgcactcccagtcttggcaacagagcaagaccctctcaaaaaaaaaaaaagaaaaaagaaagtgaagggggagcggaggccagtgtgggaggaagagacaggaaaggtcatctggatagtaaagatcacctggtttcatgttatttcgaaatttacggataattttagatatgtggttgaaaactattaaaaacttgaatattcaagcaggactagagaaagtgtctctggtatgtcttcattccagccgtcctgctgtgtgtgaagtggtatctcactgttccgctttgcatctccctaacgactaatgacatcaggcatctttttatgggcttattggcctttgttgtttttttttttgagatggagtcctttgaggtgggaaagttttattttattttggtaaagtccatcttatctattttgttgttgctgtcacctgtacttttagtgtcatgtttaagaagccgttgcttaatccaaggttatgaagtttgacgcctgcgccgactccagcacttttatagctttagctgttacgtctaggcctttggtccgttttgagttaatttttgtaaatggtgtgatgaagtcttaaataagcatagcttggacttttggatctatttttaactttgagaatgttttctgcaggaatggcagaaatagatgtattgctggagtgactttggaactgtataaagaaaaggtgaacgccagaggctgaagagggaaggagctctttccctagcaggtttctgtgtagcgagcatccgtggctggggttaaagtgttatttcattatgcagtttatcaaatgggaaaagacaaaacctaagggcatttgtatctactccataccataaaagtttgccattttactttgatcatataacaactctgaaaaatactgtttttcatggattaatcaaattaccaacattactttaaaatcacaccgagtcactctttctgtgccgcaaggtgctaggccagtgacatctctgatcttgggagccgctgttaggagcctgatgttaatgacagataaaaattgatgtcagatagaaaattaacctccttcagggtatgtgaaactgcttcccctaatcctatgttcttccttagcaaaccgaatgcaacccaggagctctgaagaaggaaaatgatcagctgtttatctgcttggcaccctttggaacagtcattttcccatctcatttgaaagcagcagttagaaaaatcacaaagaaatagtctttctaaagttttccttccattttaattcttttgtgtttttcttcatcacattttccatacaccccacacgattaaagaatggtcattctgcgtttcaaggggcccaggcgggaggatcacttgagactaggagtttgagaccagcctgggcaacatagcaacacccagtctgtaccaaactttcttcaaaaaattagcctggtatggtggtgcgcctatggtcccagcttctcgggagaaggaggcaggaggatgactagagcccgggagttcaccactaccgtgagctgagatcatgccactgcactccagcccacacagcagagtggggcaagacctggtctcttaaaagaataaaatattgactgaggatcaggacggtaaaatcacgagacctcagagaaggaacaactgtcgtggcacctcatgtgcggtgtctggccgcggcgcctgcgaatgggttttgctcttggttgtcttggaaccaaacatctgtgtgctggcatggactggacatcgccaggtgtttggaccatatctttgtggtttagcacaaaaccaagacatacagtttgtacctgtcatagtcactggagaagccgtgctgttaattgatacagaaacacagccgtgggctgagatgcaccttctgagcccatggctgtcctcagcctcatcacagaccccaagctgaatggtcctgccggactaggcatgagggctggagctcatgtgtgcgcccgtaagctggctttccattcagtggtttcaacttctgcctgtagaaacaccaaaattgtccatgaggtaaatgaaaatacatcccaggacactctcactgtcctcccattgtctggtgtcttgttgagggctctggccaggtcaacaggcaactgttttgtcctgtgaaagtgtggcgcctccgtggctttctgggagaaccgaagagagagacttgcagtcggcgaggaactccttggcgcaagcagcgtgcggatctcctcatgcttctgccgtgcctacgtgcactgacgtcgtcacaggtgggggataagattccgtcgcggtcggagttttcctgtgtgaacattgagatgtgcaattccgtgaccgcaggcactgcccctccgacacagtggggttcatctgcttgcggaagcctcttaagggcggttgggagagaccctcagtggcgcatgtctggaggctgctgacctagcgtcgcaaccatagaccaggaacacaagcagataaaagcagcaagtgggacagattgaaccagctcttggcatagtttcccaccccccagctagttcaggagtctgtggacaaactgtgtttcaagcatgttgaacaacgcagtgtgcatttccaagttcattggaaaatctatgtgagttcacttgtttgccaccagaatgccaggagtgagctccgttctcggggtgctcttccttagcccccagtttttgcggtggcttaaggctctgcaggagtcgggggtacccaggctccactccttggcccgactccatgctgttgcggctctcatctgctgtgggaaactcgctcctcgtggacattttccacgcctctggctggatttctgctcagtagccttcagccagcggtgttctcatcgtgtccatctgcttctattaagttaatgggcacagacacacggcccataaagcagctggatcaaaagtctggttcttatcagacgacttaattgataaatgtcgcaatcacaagaagctgaaatgctgttgtgcaatgacttccagaatggtgttctgggcacgtcagcttccctaagtacaactggagccgtcggtggagaagagcggaaagggagagttcagttggtaggagggaggggtccagcgagagacagggatgtacacgaagtctgtttaactttacatattgggtgcagaaaccaccacggtttaaatgcttaggaagacaactggatagacggtggtttgtttctagccctgattctgaactcatctgtcctgaaaaacagttgctgacaccctctgaccctcagaggcggtccgggctagaaggggattagtggaggacatctcggcagggctgctgtaggcggatgttgtccagtcagagcggaaccgtgacctgtgatacgtatacttttcatttttgccgtttatgctatttttagattgtctttattttacatattaggaatttgcacacacgtcaggtgagtcgtaagagtcacagaggaagttccttcttagcctgtggcagggtggatcctgcagctcccttcccccctcaccctccccccggggggcctcactcacacagcccctccggctccctttctttttatgagctttcaccttactctgttttcctcttttcttcctgatttccctaattgagtttgagtcagtgcattgagcgtgcgctctcagttgtcaggggtacacacttgtgtgtgattttttatgtggctgagatgcaccaggatcctgttgcctcagcccactgtggtctttgggtgcagaggagggttcttatgcccagccacttagccagcagggtagctgggggtgagtttcagaaccttctgaacctcaactgtctcccctccagggcaggaaggataataacacacatctaagcggggagggtgataattgtgcccatagtctaaatctttctcagatcctccggtgacattgccgggtggcctgagctaggaggaagggtgaggacttaggcagatggaggactgtgcatttcagttttttgttttaattaatttttttaactgacaagataacttagagggattttttaaattggcaaatagaatcttcagctttgccttcggttccctcatcgtagggtcagctcgtggctgccaccccaagacaacacttcctccccgtggccgccctgcggttcccttcttcccggagggtaccaacgagctaggcctggtgctgccgaaaaggaactcaggaaaaggttccaaaatttttaataggaagaatttcccaagtctaaaatacacagaacttactcaaaaagggccccttcttgtggatatttttaagagtacattttgccacgctgtctcgcgtggggcctctgcagcagctgagacgtttggcagtttcttcaagacttggagtaaaacctcgcctgagatagaatctaaatacactgggcttggatcgcccatttgactaaatttcgatcccaactctagctttcagaaacctccttatagggagagacctattgctatgggaaggcaagagaaattaatgtctgcgttattccagcaaagcccctgcactgcgctggagggacttttgtttgcgtctttgggttgcagaaggggctatgattgtgcgtggcttatcttggtctccagcccagtttagacctccttctagctgatctcttctctcacttgtactttggaagagagtcagggcttggctttgggtcaccaggcgtgcagccatgtcagagctctggagccacctcggttttgtccctgtcacggggattgactgattcttaaatgatctgcgcgaggcggccctggagcctacagcagcaccgttcccccagggtatcgctggcctgtgtttcacatagggtcagctcttcgggggttgtcactgagtagtaagtgctgagccctcctgtccctgtttgcagaggcagcggctggtttctggctggccagtgattcctccaccctgtgaacacacgtggaaattgacacggtggactctgggatgtaggggaaggctctgggtcaagggcatggcttctttatatagaaagaacaagtcagatggcaggaaagatataatggtgggtcatttaagtattggttctttgtaatttaaaagaatcactttatttatttatttttttatttttatttttttttaaagaactgagttttatgggtttgccacaaagccattctacatccccgacaagaataagaataggtgaggacccagcagtcgcatgtgaaaataaacggtgtatttagcgggaaactaatgcctcttgcagccatcaggcactgttttcccttgatcctggaacaccttggtttccggggatctcagccccagccgttgccccatagctgttcctcagcaccgcagtcgtggaagccctgtactgaattagaaccgagcagccctggctctcaaggggtcacggggtgagaggaccagagttctgcaggcattttcacgtgagaaactccagtcctctgtggctgtcccacttcctgacagcttggcttccttcaggcagcctgagtattattcccatcttagctctgtcggtatgtagtataaacacagtccatgttattgatagtttcttaggtaaaaacacattaatatttgaatcgggccaaggagcacggagaatctgaagttgtcgcaaacaagctggctgtaaatgggctcctccagggcaaggcacaccccagagctactgggggaggtggaagcttgctgtgtgttgtgtgtgtgtttcctgtggttgatgctcataagcgttacctccgtggaagaggtttacctttttaggaaagagttggttttctgcttttgcaaatttgtaccaactgttgatcatctcaaggacagtggagaagggacaggcaaggagcctccctttcagtcttggcattcttcgaaaatagaaggtggcttccttaaatgatttcccgacttgactcatcaatgtaggaatgcctgtgttgacactctcttccccctctctctctccgtctctgtccccatcccttttactttttattataggacagttttcaaccattctgtggaacagttgagaggatgataaagtgaaccctgtatatattaaatcacctacattttacaattatttgctctgttgttttgtttttgtgggtatgtttgctaaattacagacaacatgatgttttaccacccaaatacttaatcatttcttttttaaaaaactgacatttttcttataaccaaattatcttaactttttaatgtcttttgaacccaaatggcagagcccttgcaattagccttgttcccgtggaaggtgtattccattgccggccaggctcatgcatccagcaggcgcctaaggggctcctccgatatccagccagctctgacaatggggccgtagcccagaacaaggcagatgggattggctcattatgtgggttggcagaaagctccgatgaggtgttcatctgtatttctcttaccaatggaataattgtttttcctttttgctagcttgcttctgtagcacggagggccactatgaaatagcaaactcttgcacttaatttgtatcttgtcctgcttaccggcctagaagctcctaaatagagtaaacttttctgtacattacaaagtgcagctgtttaacgtttgcaagttaggaaagtcgcttctacttggttttcttctaataatactaaaaggcatactttttttttaaggcaaaggatctcactgtcacccaggctagagtgcagtggcacgatcatagctcactgcagccttaacctcctgagctcaaacgatcctcctgcctcagcctcccgagtcctctgaccatgcccagctaacttatttgtggagatggggactcaactgtgctgtccacgctggcctcacactcgtgtcctcaagtgatcctcctgccttgggctcccagagtgctggaattacaggcatgagccaaaaaaaaaaacacatacttttaaatttagttacaaatatcgcatgatttggcacattaatttcatgtggggatgtttagttctttgggttttttttaacctgctggattaaatgaaatgctgagagttgaagaaattggcttattttcctttttcttttctttttttgagatggagtttcactcttgttgcccaggctggagtgcaatggcacgaactcagctcactgcaacctccgccttctgggttcaagcaattctcctgcctcagcctcccgagtagctgggattataggcacccaccaccatgcccagctaattttttgtatttttagtagaaatggggtttcaccttgttggccaggctggtcttgaactcctgacctcaggtgatctgcccacctcagccccccaaagtgctgggattacaggcatgagccactgtgcccggcctattttactttttttttttttttgagacagagtttcgctctttttgccaaggctggagtgcagtggcgcaatctcggctcactgcaacctccgcctcccgagttcaagtgattctcctgcctcagcctcctgagtagctgggattacaggtgtccgccaccacgcctggctaatgctggttttttttgttgttgttgttttgtttgtttatttagtagagacagagtttctccatgttggtcaggctggtctcgaactcccaacctcaggtgatccacccgccttggcctcccaaagtgctattttaattgtgtatttattgccactctgagctatatttgaaaattccttttgtgaaaaagaatatttaaaaccagacacctccagcagtttgctgtatctctgtatgactaggttaaaatgcacaagtctgtgaaagcttcagtgacaccttcatcagtgtaaattctagagacttcacgtgccagctaaggtgaagtaagccacctacagcctctctgtcccgctcattacaaagaaaagctctggtcaggatacagaaaagcaactaccaaaggctaaaaatgagcagggatattagggactggagtcaaagtcagataaaatatagtgatgaatctctaaatgtaaaacattttatttgggaagcaagatttacagtcgaaggcatacaggcagaccaggtggtcttcagtatatcttgatgaacaaataaaaggttggcagttttaaaaagaggagaactgtttcgtgttgctctttgagaaggttcttcggcactagtgaggtttctggggagctggcaggttcccgactggtgagtgggtgaaatgagtcctcgaatcacagcaggttgtgtcggttgccattagtgaaaactggtttcaagtggcagcaggcagtttccgcggccaggctggcagagaactacattgctggaggaatgttttgtggcccgagtgctttcccccggccccttgactctgactgagttgggtatgacaagaatgacccagtttgtatgatcagctctcacagtgacaatgacagtcatgatggggatgtgttttgagggccttttcctctcctttgccgaggaactgcacagggaatgctgatggcgagacctccagggaagccacttatgtcttcaccactagagaaggggggactctgcatgttggcgagagcaggggggtgccacactccagcacatcgtgtgttcaccttctaaccgggaagctctccttgttcaggagttttcatagagcgtctgtccatggggagaggagtggctaggtggggtgggtggtggtgtcccggaaccagtcccccagggatacccagggatgactgtatatgcccggaccaagtcctgaaggtcatagcagaggccgcttctgcacagtggggtgggagagtgaaagttagactgacgcacttttgcgtgacacatgtctgtatgatttgggtttttatagtgaccgccatttgcttttattctaaaataaatcagcatgattcagtgttgtgtaaaagataaatatgaaaatgctaagctatctcaacatggtgggtttatacaaatttttcacttttttatggtaaatacatgtgggtttttttttaattaggaggaaacaaaggaattttcattctcaaaaatgaaaacagcattcaatagttatttgtatgatatttgacaaggttaccgagctgaacattaatttgttcttcattgttaaaagaaaactctaggcaaattgaatacaacagagtttaattgagcaaagaaccattcttgaatcaggcagccccagaaccagagtaggttcagagtgacaccggcactgccatgtggctggataccattcatgggcagaaacgaaagtgactccggagaatggaagagccgcagcagctggattggctaccgcagggggtctgccttgcttgagcccagttcgaacagttggctgcctgtggtagtctgagactcagctgcctgtcacaagaccaggctgtttatacatcaggttgggttacagttcaccatgtatatggaaccattaggccaaacataaaacatgtacggaggcagcctttaggcgaaacttaatttaacatcataaaaatcttgaagccacttgtttgcgtacccagcctggatccgtcacaattcttgcttcatgccacactcatcactagtccatatttggcctccttttaagcagttaattaacaggtatttttatagcataatgggtttcctcaaaccaccacccaaccaaaacccagcccttgatgatgacctgcgcccaccacgcagggcgcccttgatgcacacgcacctgccgcccccgccctgtgaccaccgccctgagtgccgggctcatcatcccttccatgccctttctacattgctactatgcatctgtgtgtattcattaagaccattacttttctttcagattttaaatttattaaaggctttagtgctgaatgtgattttgaggactcttttaaaaaaatacttttggttggaatgtggacatttcccacttagcattgtgttgctcatgttcctccatattgatgtgtgtttagctagagtacccccgtctaactctgcgaatatgccacactgtgtgcacctgctactccttaatggacacttgagctttttcagcttcttcctttatttgtttgttttgctttgctttggtgtattgtattttatttttgctattaccaacagagatactttgaacattcttttctgtgtgttcttttgaacacatgcaagaatttcttatatattgaaaagcagagttgccggatcatagtgtataggaacattcagttttaagggatcatggtaaggtgctttcccagtggttgtgccattttacactcctacagtggtgatggagacagcctatgatccacatcctttctagttcttggcattgccattcttgtacatttttgctgagtaggtttagaatgatatctcgtgtagcctggatttgcgtttctctcatatcgcatgatgttgaacatttcctcacgttcagtggccatagttatgtcctcatctttgagatgtctgttcatccatttttctattggatttttaatgctcttgtggatttatatctaggttttcaatcctggttatgatggatattgcccccacctttttgcttttcattttaggacgactacaaatgttaacaagtttgtgtgtcatcattacttcatagatccccttcagcgtctcttggagttttctcccctctaactttagcttgtcatctgaaagtgtcttcctcatgagtctttttgtgacaagtcttctgaggccatatgtgcctctgagagtatttttgtcatgctcacacatttgaatgacagtttggctggatacaaaattctaggttttagcttccttttcttcagtaaattaaaaacaccagctgggggtggtggcttacacctgtaatcccagcactttgggaggctgaggtgggtggatcacctgagttcaggagttcgagaccagcctgaccaacatggcaaaaccccacatttactaaaaatataaaattagccgggcatggtggcgggaggctgaggcaggagaatcacttgaacccaggaggcagaggttgccgtgagccaaaatcacaccactgcactccagcctgggtgacagagtgagactctgtctcaaaaataaataaaataaataaataaaaataaaaacaccacttcattgtcttcctgcatcctgtgttaatctgataaaaataaaaacaccgctccactgtcttcctgcatcctgtgttaatctggttcttgtttctttgaatgtgatctactctttgtttctggaagctttgtatgtattttcattgtctttttaatattcttgatcttcactatgatgtacctaatttatgatgttcttcctctgtatatcataagacctcacagaatgtgacgattaaaaaaatcagtataaaagacagaacaatggtcgccaaataataagcactaaataagcaacagctgtgttatattatcattatattcagctttgtgggttttttgagccatttttattacctctgcctttgcccactctttgacctttcattgctcagcaacactctgatgtaggtgaatgaaagaaatcgtataaaatgtgaaaccagttgttagcaattctggtataaagagaatttacatttttggctaaaatgaagtttgcatactatcagtgactgatatatccatgctacgcttattcatatagccatgctataataaagttgcatgatattcccattttaattttttatttaagggaacattatattttcactgaatttataatatgcttatctcccagccaataattatttttataatgtgtaagtctctgtgtactaattccaatatctggccaactatgaatctgtttttattgacttttttctcttgattttagatagtatactatctgttgtggatgaggcattgtagacattctagattctgttattttcttttgggcaattacactgatcttgtagaggcttcgttataggactaggctcttttggctttgatcttagttctaaggtgtggttcataatccctctggggtgtccatgtcctcagatgtgatcaagccctgtagtttggcaggacctgatcttctctgtcttcacagtggcaagcagatgtcaaaatctctactctgcgttttcaaccttcctgctgtcctccacggggatcctgggaatattatcctgtgtgcgtgcccttcaggagccagcctccgactcggggaaggtttacatgagggttttggctcccttcttcctagggcttttgcctgcaatatccaggcagccttgagcatggtctcaacccagtaaggctgctgcctttcagtcgcatgctaacccccacatgacttgtgagtgaggagcacccttgggaaaagccagatgaaagtgattcatgcagagttactctcattttctaagggtcacggcccttccatttcctgccttcctgcctgcatttgtttgttgttcagaattttcaaatggctttttaatattttgtccagagcttatcattattggcaaaaggatgagtctgatataagtgattctgtcattactggactctagaaatcccaatcagtaagtacattatggataaaaagacaaagtagcatggttcgcataggactcagatttgaaaatgcatttcctgtagatcatttttatccacagagaaattctggtttgcctgggaccaccgtaggagctgcatgtgtctgtgctggtgcagaggtgtctgggcatggctgaggagagcatctgcaagtgaagccagcagaggagaccactcagagtggcactgactggctcggggaagcactggggccacacggggcacttgatgccgtgggaaagggctgctctgtagcttcaggcaaacgtgggcctcacttttattttctcagctctttgaacgataaaacactgactactgcagccacaaccaagaatataacttcctctctgctggctgagccaggtatcacttcttgagagagtgagtgtggctggcagccatgcatggggtccaggatgaccagctcagcctcccctcgccctgcagggctgcaaaagtgagactgtcttcacacctctggctcgttgtcttcctggttctggatctctcagttcctctgtgtctttttctcccatttcctatcccactgctatgggtaccctcctgggtccaccatcccccatagaggagtcactgccacgtctcccccgaacgtgcctgacccttgcactgcaccctcccctgggccactgtccttctccatcactcacttccagccaacacttctgccatcactcacttccagccaacagtccgcgagtgtgttttggagatgtgcatacttgctctgcacctgccattatgtttttaaggggtgttatttgttcttaattttaaaagtaggtgaattaaacattttgcatttctcctactaaaaatactgcattgcctttttactctgctgcctcgattctgcccactgtatgccagtagcccggatgggaggagagatgctttcctacctcctgttggcgccacgttagagaaagcctgtccggctccacacgcgctcctaaggatggacctgcgtcagacatgaacccagctctgacctgtaggattttatgattatgaacatgatataattgaatttgcatttcttttgtgtgtcttgaggctactcatttattctactccagcagtctccccagctcacttccttaagaaggaaagaagtggcaggtccagtccactccagcatctcgtttggagactgagctttattaagcatctcggcgctcctctccagggaccgggcttcatgtggctgcaaacggcttctctcctttctcctgacaactcactgtggcagctctgtagtctcacgccttgacagaatggcaatgagattttctttacaaatctaaaagctgccgaattaaggaaatctgagtgtacttgttcaccgtggtagtccctgtccccacctttaactcttccctttttctgcaggcctgttgaatttcctgggtgactgttccattcatgccgttcacattcttttctttctctgcaggttttgcatgcagaaatgtgtcagtctggtgcctggcgtcacactggatttgatagaaaagtaagtaggatttttaagctcttgtggctctctggatctgatgagtttcttttcctttttgaaggctcttgcttctcagaagtactttctatcaacatggcatgttccctttcatgtggctgtgttcttttgttctctgattaaggctgtgtttgtgattgtcacactggggcttagtgcaggagataaccaaacatgggccatatgaaaagaaaaataataaaaagctgaattcctttgaacatttaaaaagtctccagactttaagccaaagcaagaacataccacttcgcatacaaatcatttctgctgccactgaaatgatagctagatcatagctagctcttaccttattttctgaaactgtccctttaatattctgtaactttccatcccctccccccctgtcgccatccagtttccattttactatctcagggcaaactgatttcagaacctgagcgatgaagtgacgggatttagtcaggcctatgaagagtcaatggcacttgcctcccataatccttccagtcccattggccaacccgtctgtccctcgcgtgatctttttggatctgaagtggtgtttcaggacccggagcgtggcctgcactgccttgttctgtttgtttgtgcaccggattcatcgtgactcatcctgagtcatccaggcagtatggaagaactttggagttattttaaaccctttggctcagaaccccatttcttctagaattaacatgcaagataattgttttctacatcttaatatacaaagttatatcttaatattagggcctgaatttactaaattaggcaggaaaagcaaccccacttccaagtttctcttgtaaaaacgtgcttgccttgtgtatcaggggaaaaatgcaagaatattatgtgtaaacgttcatgagggcacggtgagctccgtcgtggttcactcccaccgtggaaggtggctgtgtggccaacaggaaggccggggaagcgacactggtcctgatgtggagtggtctaccagatgtgctaagtgagcagtcctcagcatgggtacctaacagagctcagtgcccagaggctttccaaacagtgcaagctgtgacttagaagactgtttccaaaggctaaacagatagtggaggctctcagaagcatcacgtggaaaataactttaaaaaaaaaatgggactagatgatctgtgctcccctccccttctggttggtttggttccctgacgagactgcagttttgcgaagctgttcttgagatctgtttactggtattgctgtgcgctttctttggggcttttatttccccctctgttttctgagttttagagctctctattacctgtaacgtatatattgcccccgccacccctgcgccctccccacacacacaccggatgcgtatcccaaatctaaaaatccaaaatcaggaatgcatcaaactgtaaaaaaatttttaatgaattaaaaaaaaatagggcatcttgctgtattggccaggctggtcttgaacgcctggcctcaagcgatcctcccacctccgcttctcaaagcgccgggattacaggcgtgagtgattctggccgtgccaggccaaaatcggaaactttttgagcactgatgtgctactcagaaacaatgctctttggagcattttggacttcatgttttcggattagtgataaatccaaaaaacttaactggtaagtataatgcagatattccaaaatctgaacaaattcgaaatccgaaacgcttccggttccaagcatttcagataaagggacacttaacctgtgtatatatattatatatctaatttcttaaataaaccatatccattaatatttcagcagttatattttatccttgctgggttggcttattcaggcagctcttgggtgaaaactgtcttggtgttttctgtttgtcgtgcctccctgtggctatttccatggtttcctctggaggtgggagggccgcagtatcctttctcctccgcctggtagcaggagcccaagccttacccacgcctccatctccgtgtgggacagtgtctcgtctccatcctggatggctgctgtgtgctgtcccatcccccctggtcacctgtgtctgtggctactccggacagagccccccggtcacctgtgtctgtggctactccggacagagccctgccagcgcgtgttgagccacatgagctcagacagcgccacaagctccacatctctagagcaaaaaggtctgttaaaaatcacctagtgatgacaacaaaaatttgttttaggttattgagtcaaactaccttattttactgagagagaacctggtatttagttcacttcagctcctgggtggccttttctgcctggttcgggcagggctggcctagagctcaggtctcaggacagccccactgtcgtctgcccaacacacggaggttttcccttgaacaagattttggtgtcagaacaaccagctgcctccctgtttctttccaaaacttaaaatgtgcacagcaacatgacatcctaagcatgattcacaaaagaaaaaaaattggtaaattggacttcatccaaatgtaaaatgtttactctctgaaagacacgctgatatgaaaagacaagctatagactcggagaaaatatttgcaagtcacatatctgacaaagaacacatgtatccagaatgtataaagatatctcaaaactcaaaaataagggggaaaagaaaattagaaaatagaccaaagacatgaagagacacttcaccaaagaggatttagggatggcaaatatgcttatgaaaagatcctggaaatcattagccattaggtaatgcaaattaaaacacagtgagacagcactgtccctattagaacggatgacatttaaagactgaccaaacgcagtgttgagaactcacatcacagctgctgggaatgcagaatggtgcggccactctggaagaactgtcggtttctcataaatgtccataaacctgccaacatgtccccgcattcctactcctggatatgtaccctggaagagggaaatcttaggatcacacaaaaacctgtgcgtgaatgtttacggtagctctgttcattaccccaagccggaagcaaccaaaatgtccctcccagggcaaatgaattcagactgtggtgcatccgtatgatggaattctgctcaacaggaaaaagggacaggctttctatatacaccgccatttgggcggttcccagaagtatcacactaagtgtcagaagcccatctccaagggtggcgcatggtccgattccctttctgtgaccttctgggaaagacagaacatggggccagagaacagatcagctgttgccagggattagaggggtggagagtgtggctgtgaggggctagcgggaggggcctgggggtgatgtcttgatgctggtgtggttccacagatccacccacacgttccaatccatagcatgtgtacctgcagaagtcattttgctatttgacaactgaagtaaaagtaatacataatgtaggggaggaaaaaaacaccacgagagtgagcaggccggagagtgcagagcagatgcagcacacggctggccaccgctgcggacaacaggccatgggcctggggagcgaggggtgcagggaaacagagacctggatttgggaaaggaagtggattctacagcagcatgctctgttgtttctgggaagataccttcactcttattattaaaatgggattgagtgaggattgaaaaagagaagcaaacacccttccccatccaccgtgggatgttagtcattttcatcagacgccctttccctaaatcacgatgttagcgtttgcagccactcgtgttcttcccagaaccagtgcatcccctccctccccagcaccaaaggcccttctcagccagtgcgatcagacagctggaggttagggcagtgttctcgtctttcttccatctccccttctcctgtgccaagtgatgctatgaaggtggctaaatgctaaaggtttattttttttttttaatttaaaagagacaattaactgttaatagtaggcagttttcaaaacacaccctgattagggattcggggtacgaggaggagagtgtggtgggaagaatatggacgttggagtccgagcagctccatctggccctcctgaccccttctgagccacactcactgggcacctccttgcctctgggtctgtctctgtcctgcagaatggacaccactcggctctcatcgggcagcagcagtgccgagggcatcacacatcctgacacgaccttggctctcagcccgtgtccgcctcccgccagacacttctgccttctcagcacttcccagagctgcagcttggatggtggctgctgtcactccacattcctgtagttctgtaagcgtctcccacgcctctccatctgccatcagctgaggcacctacgactcccaggcatcgttgccctggccccaccacagttagagagagatggcaaggcgccagagaggccgtgctctcgaggcccattgctgagacaaatggcttagcaggctgttttagtccattctcacactgctgtcaagacactgcctgagactgggtgtattagggttctctagagggacagaactcataggatagctataaatataaaggggagtttattgattaatattaactcacacggtcacaagatcccacaataggtcatctgcaagctgcggagcaaggaagccagtctgactcccaaagctgaagaacttggagacactcagtattaaccatcacactgggtaatttataaataaaggaggtttaactgagtcacagttctgcatggctagggaggcctcaggaaacttacagtcatggcagaaagggaagggtaagcaaggcatgtcttacatggcaggagagcgagagcacaccagggaaggggaagtgccacacttttaagccatcggatcttgtgagaactcactatcacgagaacagccactcccataatccagtcacctcccaccaggtccccgcctcaacacatgggtattagagttcaagatgagatttgggtagagacacagagccaaaccatatcacagtcgctgtagccacctcagtctttattgagaataacttcttaaagtgtgtggatttgggtctgagtcactgttctctgaatgcagttcagcaaaagcacctgttttagtgtctttcactaagaatccacgtcagcactcacagggtgaactcccgtggtgcctccgcctcacagtgtgacagaggttaaattgcgggtggctgaattatatttacattttttatgccaggacaaattccaaactttagaattatacagcaatggagaaatccagatctttgctccaaaaggtgcccagccacagctgccattagctctatttccaagtggacgtcagtttttaacttgcatagacacagtgacttctccgcttaaaaacgctatttttatgtttttttaatttttggattttgttccccaattatgtttaaagtctcataagaaaagttttttgtttgtttggttgtgtgttttttgttgttgttgtttttccagacagggattcgctctgctgcccaggctggaatgcagtggtgccgtctcagctcactgtagcctcaacctcctgagctcaagtgatcctcccacctcagccacccaagtagctgggactgcaggtgcatgccatcatgcctggctaatttttattttgggttgtttggttttttttgtagagacagggtttctctgtgttacccaggctggtcttaaactcctgacctcagatgatctgcctgcctcggtctcccaaagtgctgggattatgggcatgagccgctgtgcccggccatgtcttttgcatattgtattatctacaaaggacatgagttactttttaaataagtgatcttgttaatcaagtgatcttcctgccttggcttcccaaagtgcttggattataggcgtgagccaccacgcccagccaaagaaaagtttttaataagtagatttgattttgcagttacaaagtgaggcagaaaattcagcacatctatgtttaatagtgtcttccatgccgctgtggtttttacagtcagaggacactcctataaaaaatacctcgttatttttatactttatcattttctgaagatttattcttgaaatatgttgatcttggttactgtgacctctgtggctcagaccctcttggccagcctttctactacctcagggcccctttttcccacgggggtcccaccaacatatgttaactcccgtaacgctagcccacgtgtcaggggagacagatccactcggaaagcagccgtgcggtacagttgagagacaaacagatcatcatcaagctctactgatgaatgcggcccctgtgttccaggcagccaagactgagttcccccttatttcccttcactgaacatgtcagccatgtttgtgatgttcttgtgtgtcccttgccctgagttgacgctgggaccagggtgcttgaggatgagctcccagcaattccaggctgtgcctgtcaccaatgtgccccgggcaagggagtcacctctctgacatggaagcccagaggttaccttctggaagcaaaccctgtaaccaacttccctccttacagggctggaagcgtagcagtgtccaccatctgtggaatgtcctctggagccgccttgcccatgccacacagaaggacaccacggttagggcacccatgcgtcacagcatgtggccagcagggccacgccacctcccagggaggcatctgacatgcacaaaaccttttgagtttttgtatgtttttttcaacactttcctaaaatgcagtgatcaaaagttagttgcctgctcctgcttgggacaccagtccctcagggggtttgggaattgttcctcccagactccggggctgacatttggagggtcaccgcctgacccctgctccagagtcagcaggatggcgctcctccaacaccactcctcccatcgcatgtgggagcaggaggggtgtggtcttggaagcgacaccctatgatgcgcattcacctgagtggccttcctggccacagggctgagccaagggggggccaaggcactgcctccctccaggcagcacgtgtgtctaaaaaatttatttataagtacccagggaatatttaaaaatatataaatttttgaatagttgagagattttaataaaaacgtttgtgcattattggcagagctgtcagtgggtgctgggtgagagccacacggttgtctgggtgacacccccgtgtccctacacaccatgactgtcctcctgtccacctgagatggaactctgggttccctgagtcacacctacattaaaacgtacacagtcatccatcacgttcacatctgtgccggcatgacctccctggggaagcgtttgcattgctgccctttttgccaagaccctcccgagcgtgatatgacctttgaacctagagccagagaacctgcttgggcgtccctgccttcgttaaatgaactgatcttggatccaggttaatggtgagataacttgtttttaattatagttttaagaccaggcagaaacaggctctcgtgcttagtctgatttcatttacgttttagcagttcattattgtaaacagaatcctaaggactgtagaccgggggcgtggaaaccccaccacaacacagcacctagaacacacgtgtgtgacatctcgagtgacgcacattcggaacagatcgtgtggatgtgcagatgtcagggagtctgcagtacctgcgcatacactagctggggctggacttgatctgcttttagcttttgccagctttttagggagtctgaagacctagtttagctgtttcattcttttgtctcaactcaccacatggaaatttcttgcccttgagaatacctctcttgccactaagtgtgaggacgacgttggttcctgggtcccacctgactagtgtgacgagtcacgtgacgcaaggagaataacgggcctgtgttctcgggctttttgtttccgtcaagcttcatgacctgcaggaagtaaaaccaggtctgcctcacgctctgcacacccctcccctccctggcggccgccctgcacaccccttccctccccagcggccgccctgcacaccccttccctccccggcgaccctcgttgggagcgtgtgaaggatggtcctgagtgcaggctgcaggtgccaggtggtgatcggcacataacgtgacagatgggcaggtgtgtttgtcacgcacagacctgcatggtaggcacctgccccatgcccatgtgtccttgcccgctgccatctgagaggatgtaccctcatcctacaacagctggcccttggtgtgccaggtctgccaggccagagctctctaggggtccgtgttgggtaagtgcacggcaggtggccccctggccgagagcctcaggaccccgctgtctggggtttgggggctgagtgtggcacagcaccactttcatgccctctggaaggcttggcttttgcgacctggcctcctcaccagctcaatggcagtttcatggcatagcgtccctgctgcccccagacggtcagaaatccaacccgagtcatatcattatcctcgtctttgtcggcactggagacgtggggaggtttcgttcctcagaactgctgcacgatatgtcttccaaaataaatgcggtttatttcaaacagcagcactcaaaatcaaggctcctcaggaaatccagtattaaccccttccgagctttcgccgtccttgtcagatgggcaaaacacgttgtttagcatctcagcacaagactggagagaagatcgggcagtttgtgcataattatttagcagtctttaaaactaggagaggaatctgttttctaattaagctgctgtgtctggaagtaaattatagtgaaccttcctcgagcgacccccccagtttctaattatctatgctaacctagcagcctgatgaataagctgttgctgctgcagtacatatttatattctgaatcctttgagagagtggcaataagatccgtgcctggaaattaagggacatttttcagccctgaaacaaagtaatgcaacacttaaacagtgctagaaatattagggttttcagaaagctccggggaacctgagagatgtgaacctgttccacgaggctgctagttagtattctgatcactggaggctcaaagcgtacccagaacttactcgtgattaacattgattgtgtacacagcatattttaaaccgctaacaatccattgtcgtgaataagtgagtctctgtgtgctgctgcttccgaggctctggtagcacggctgccccgtgtggcccagggacagcaggtgcggggctgcagccccacagccctggagcttgggtttgactctggctctgaaaccttcagcattgtgttagctgatctctggttcccatctgtgggacttccgtctcatctgagcctggggatgcagtgcagaaaatgtaaggagacctgggagctgctgcttgagagcacgtggctatccgtgcttcctggggaatgatagtgaccgtaggaagcatttactgagcccccatggtgccaggcatcgtgctgaggcctttacaaacattacctgtaagtcctccctggagcccttcaagggtgggtgctgttgttatctaccttttaaaagatggggaaactgaggcacccagcaagcacagggcctgccaagcaccacaccattaggacaagctgggacagggatttgctggcagcctccctggagcctgcatctccttcccctcggcatgggctgtgtgaacagagcacgggctcctcaacaggagcccagacctctagaaggtctgcacagggtttgggggggcagcactcgtgtcagaggcacagcggctgtgattagaattcacttcatcgagggaagtcatacacatggattatgtttgaaaggaaaactatcaaaagatcccagtcttgattcaaaaaatacctttctttccaacataaatatacaatattggctggtaaaggtgaaaatcagtaattcattaacgtctgccagtcactgctgagatgagtaacgaggcactagacgctgatttagaaatgaagaggtggaagcaaaacccgagagatcgccgagcgagggggaggtgagtgattggcggaaacgggggaccgccgccacctagcagatcacccctgcctgcccgagcacagccacctcagcgttcccgtgcgcgccacgccagggcgcacggtgctgcacgggggtccttatgcccgggcgcctctcattaaggtccccccacgggcagagggaagacgggcaccgggtccccttcgtgttcgatgtgcaccccagcaaggcctccttagctcatccggattggtaggggtggaggaggcttggttctgagatgaaattgcagacgtgcagccaagggggaatgtgagaggttcagaggccaccccagggaacctgcacacagcacggagatcttccgtttccttcacagtggtacccaaaccctggtatttgtcatcaaaacaaaggcctgcgccacagagcacggagctgtaacatctgtggcattcgctccacctcctcacggctctgcacctcccagcatcctaaagaaaacgtgggctgggcgcagtggctcacacctgtaatcccaacactttgggagtctgaggcaggcggatcatgaggtcaagagatcgagactatcctggccaacatggtgaaaccgtctctactaaaaatacaaaaattagctgggcatggtggcgtgtacctgtagtcccagctacttgggaggctgaggcagaagaatcgcttgaacccaggaagcggaggttgcagtgagtgagctgaggtcatgctactgcactccagcctggcgacagagtgagactccatctcaaaaaaaaaaaaagaaaaggaaaagaaaatgcatgtgtctggatatctctaaaggaagccctcgctctgcggagatgcaggagcacagcttgattggagggcagcttccgttccttgaaggcaggctcccaggtgcagagcgaggaagaggccgcagtgaggctgagcgtgtgcctggtcagtgccccttggccgtcctttctgatgttggcctttgctcttgtgtaggagtcatctcagacggctcagtacctatggaggcacacgtcactgcggtcgcataaccgggatgaggctcagcccccattgatgcctcttctctagacgcatcgtagttcagcaggtgcacctccctccgtccagtctgccatttctccttaaccttccctgagagtctgttgctccagctccattgcccgcacggcccttcggttcctcacaacccctggttctggtggggtgcctggagtgcctcctctggcaggggtgcctccttggatctgtttatcctgcaggattcagtgccctgccgttgttcctatgtgcgtggctgcagacttgcaatcggtgataaagcagtgtggcgtgaggcgccagcataaccggggaccccgggtgtgtggtggcttttccggtgctcatcacagccacccggcgagcagcctctgaggccatctccatttaaacttctggaaaccgaggcaagggaggtggagagacttgctcagggtcacagagagtcacacgagggtcccctgtcggtggcggagcctgtgtccgcccccacccgtcctgctgtgtctgcccccagccgccgctgctggcttctcagtttgctgctccgtgctgcacagtcccctctgtcagagcctggtcgctgtgccctgtggcccttcagagaaaggcctccccgttctgatgtgcgtgtgttgtcttctgacctcgatgccagtatgttttgcgtgagtggccagctcgtcagcggggcctcgggttccaggctcgagcgcacttttcagaccccgcgtgtgtttctcagcacgtttgttcattcaccgttcattcagcagacatctgctgcggactggctgtgtgctagggcctgtccgaggctctggagccaagtccttgctcgttaacttacatcctgatcaggggaagaaacgcacataagaggagtgtgaatgtaccaggagagccatgtgatcgcacacaagagtgcctggatgcttctttgattgggcagcctgatgaggcccatgaagaggcaacactggaactgagaccacctggccagacgggagcagccatgccgggaccaggggcagcgttccagacggggagccccacagcctctgagccaggcacgagcttgggctgtgtggcaagggccttctttgaaagaggcatatgtagcttcagtatttataattaacaccgctaacctggcagcacttaatgggtctacaggggcctgtgtgagtctgactcagaccactgcatcagatggggaaactgaggcacttaggagcttgatggctacctacagaggacattttgctccatgaatcagtggcgtgacccgcagtggccgcagaaggggcagtggcacaagcctgactagtggctccgtttgcagagggggtgggggcgactgacggccagcaggagggccgtggtgttctcacctgagaaggcgggcgagcactccttttgctagaagaggctaagagatctctacgattatttccatggatgatgacccaaacagatttagtgtggctgcgtgtgtagctgctgtgtcttctagctgtttctggagaccagaatgtgcctccccgaaatatgaagaattgttgggctgaagacaattaagaagcaagtgcaagagagctcctttcctgccttctgtttccctaaagcaaaacatagatctacagagacaaaggcatcctgtcccgccccgtcccagggaggacagcagcaagccccgaagacagctccaggcccacgcgaaggtgtttccttcattttctagatgaagtgactgagtctcagagaggttaactcacctgcccaaagtcgcacagctaggagtggccgagcctggaggacagagccgggtctgtgtgatgccacccccaactctgcatcggctggcgtgtggaaggacgtccatcccttcacgtccctctgcgtgtttgtgagtgcgattctgaggaaagtggcatgagttttctgcatcaagatgcctggtctcaaagggcgggttccatgtggacctgacaaaatgaggggatgtgtacagcatgggaggagagaccggttattttgacccaagccccgggtgcccagtggtaggaggagtgctgaccttctgtgtgatgcatgcccaccaggaaaacctcagaggattatcccagaaatcaggcataaccacacaaggctgcctgtatttggaaactgtctttcctagggtgttttaacaaattcacaggaagacacaatttacaaccaggctaggaagtgactctgggatttcagcatcttttcagagacagaaagatccagatgagctcaggacagtcgggggaaggtggtggcaatctctgtcagaaccgtggagtgttcgttgaagatacttccacagcaggagagctccacgccccatcctggaagctcaccctcctcccctcccaccctctttaggccagatttttgcagagaagctccctgatgagatgcagcgtgcaggtgagagtggcgtctggagacagcctggaggcggccagtgcctccggagggaagtgctccccaaccccggctctgctggagcccgtcctgcttccccttattttaggagctgcttttctcgatgtggcaggcctttcagcagcttctcaggagactctgcttggaggtggcttctcccatgtgactcctgcagctgcctctcaggaaaggtctgtctgaaggtcggccctgacaccgggaagcccacagaaaatctgttttgcagaagtgcttcaaaaataaacatgggctcagatgtctttctgatgggctttggaatctgcctgtttaataaaaaagaatctgcttttcattatgtcatcaacatgttgaataagaaaatggggaattacccctcgcctcgctgtggccccatctctccctgtggtttttgtttgcagcctccagagtggccattcctgtccattgttgttgttgactgactccaggaaggggcaataatttgtcgttctatagtaagtcaggtaaaaggtgaattatctcctgtaatattaactctgcttactgttaagtcagggaaacttcctcccgagttcaaccctacatttacttcacaagtaaagatgagcagaagtctgtactaggggaaccattaaatacggaaggacaggatccaaagagatggcagcactgtgcatatgaaccatgtgatttagaaaccgagcagagatttttaaaaatcattaaaaaacaagccgcctctggtggtttttaaaaagccagtcagcttatgcaggggtggaattatggaactttctagtttctattgtctctcgggtgccatgttcactccaaaccatttcggtaaccctgagccagtatatcctcctggagaaattaacaactgcttcctttaagtcaatgtttttcaaagttcaagtcatggttgattagtggctatgaaaccagttaggtgggtcacagccagcattttaaaaaagaagaaaatgtcattgttttcatagtaagataagtgttccgtggtcctgttgcttgaacatgtatctcttttttggtttgcttttttgtttctgttgtttggaggcatggacagggtacgaacctgtgaatatgtatctttatatgtggttgtgtatgtgtgtttgtctggtcaccaaaaatattcctagggctcatgatcaaacaagttggaaagcttcttatttaaatgatctctactcttatgttaattggggacctagacacactgaccaccttaattgcctatactttagttaccatcagtgttgtgaatacttagtcgttttccaagaacaaccttgccccaaatccctgctctaccatcatcagccttgtgccatattatggtttcctataatctgtcccatttttaattaggaatattgcttatacgtatatcttttttctttgattttttcttttttttaaattctcttttgcttatacatatatcttaacagcctcttcttttcttgttgaagaaataattttgacaagtttttacattttactttaaattaaaaactcatttcccttttgaccacatgcattaaccctcagaactgaagaaggccagattaaccgtaccaactcacccttcttgggagaatgaagcaaaccttttatcatcaagatatgtcaccctttatctctggtaatgccttttgccttagagtccacatttttaaagtatcgtagctgaacaactgtctcttggttagtgtttgcagaatgcatcttttttatccatatgtatataaggtagatctctttttggcaatatagttagcttttatttagttttgttttaaaatagagacagaacatttttggttttaattaaagtatttagtttgtttacatttagtgtagtaattgatatatttgggtttaagtctgcctcctacttgcttcatcctttttttttcctgttgctttttattctagccaccccaccacccttttttttggagcggggggaacggagtctcactcttgtggcctaggctggagtgcaatagcacgatctcaagctcactgcaacctccacctcccaggttcaagtgattctcctgcgtcagacttccaagtagctgggattacaggcacacaccaccacacctggctaattttttgtatttttagtacagacagggtttcaccatgttggccaggctggtcttgaactcctgacctcaggtgatccgcccaccttggcttcccaaagggctggggttacaggcatgagccactgtgcccggccaagccccttttttttttaacttttcttttttctcctcccttaccatcttttgagttgatttagcaattttattacacctttcttctcttctgttggcttgttaattttatattctttactatactttgagcatcctgttttttccattaactgccagatagtatatgccttagactttgcaggccatgtaaggtctctgtctcatagtcttcccattgttacaactctttaaaaatgtaaaaaccattcttagcctgggggccttaagaaaacatgctcctggctggatgtggtccttgggccatagttttggtgacctgctttagaaactataacgtgcatcctgctaaaaactaatctaagcctggcacagtggctcatgcctgtaatcttaatgctttggaaagctgaggcaggaggatcacttgaggccaggagttcaagaccagcctgggcaacatgataagaccctatctctaccaaaaaaaaaaagttaggcatgatggtgtgcacctgtaatctcaacactttgggaggctgaggcatgagaattgcttgagaccaagagttcaagaccagcctgagcaacatagcaagaccccagctctacagaaaaaattaaaatcagctgggcctggtgacatgcccctgtagtcccagctgcttgggaggctgaggtgggaggatcacttgagtcccagtggttgtggctgcagtggctcgtgatgcaccactgcactccagcttgggtgacagagcaagaccccatctgctaaaagaaacaaaaacagagtaccctttagtacagatctgctgggaaaaagttctcatttttatttgtttgaaaatgccatcatttctcctttgttttcacgttttcaaatcagcgttcttgaggtgcattcaataaaatatacccacttgagctgtacaactgatgagtttgacagaccactgtgcccgtggagccacaccacagtcagcgtatatcccgtgtgtccccttgtacctgtcccagttaatccctctccttatccctcaagcccaggcaaccattgatctgggttttctcactatacattcgatttgatgtttccagaactttctgtaaacagaatgataaagtatgtgctcttttctgtctcttccttggctcagaatcatgcctttgagatgtctccttgttgggagtatcagtagtgtgttcctgttcattataagtaacagcccgtcaccctgtgtgtcacagtttgtttcacctgttgatgcgcgtttgaattgttcctgtcctgactgttatgaacaaagctgctgtaaacattcatgtgcaagtctttgtgtgggcatatatattcatttctcctggataaataccggagagtgaattgcttggtcatatggtaggtgtgtgtttaactttataagaaattgtccaactgttttccaaagtggtttgctgacctgagttcctgccagtaacaacagcgtgccagttgtggcgcatccatgtcgacacttggcattctgccttttcggggttttttttattttattttttgagatggcgtctcactttcttgtccaggctgcagtgcagtggcacagtctcagctcactgcaacctccgcctcccgggttcctgcaattctcgtgccttagcctgttgagtaagtgggattacaggcgggcgccaccacgcccagctgattttttgtatttttagtagagatggggtttcaccatgttgcccaggctgatctcgaactcctgacttaagtgatccacccacctcggccacccaagtgccgggattacaggcgtgagctaccgcgtccggccatcttaccgaagtataacacaatatcattattattttaatttacatttgcctaatgatgacagagcagcttttcctatgctgctattggccattaatttatattctttaataaaatggatgttcaagtctcttgccaattttcaaattgtggtgtttgtcttcaagagcccttcatgtgttttggacacaagtctttgtcctatctatacattgtgaacatttttgctaagtctgtggcttgtgtttttatttctaaaacagtctaggccaggtgtggtggctcacgtctgtaatcccaacactttgggaggtcgaggtgggcagatcacaaggtcaggagatcgagaccatcctagctaacacggtgaaagcccgtctctaataaaaatacaaaaattagctgggtgtggtgtcacacacctgtactcccagctactcgggaggctgaggcaggagaatcgcttgaacccgggaggcggacgttgagtccgtccagcagtgagctgagatcgtgacactgcacttcaacctagacaacagagcgagactccatctcaaaataaataaataaataaataaataaataaataaataaataaataaaacagtcttttgaagaacagaagtttttcattttgatgaagtccgatttcatcatttatttattttatgatttgtactttctgtgtcctacctaagaaatctttgccaaccctcgggttgtgaagattttctatttttttctaaaacttttagttttaactttcatgtttatgatgaacttagtgaactatgattaacttttaagtctgcgatccgtttcaagttgttttttaatatagtcaagagtcaaggatcattattttccatatagataccaaattgttccagcactgtttgtggaagaggctatctttttgtcattgaatttccttggtgcctttgacaaaaatcatttgactataactgtatagttctattctattctcttgatctgtgtgtctatctttattggcataaagataggaataccacattaccttgatcacggtagctttattgtaagtctctgtttttgttttgttttgttttgttttgttttgtcaaaatggttttggctactctagatccttgcatttcatatgaatttaaaaatcagtttatcagttctaacgagaagcctgctgagattttgactggaattacattaaatctagatgaatttgaggagaattaccatcctagtaatatggagtcttctgacccatgcacatagtggcttcatcttccataatcatcacatactgatttagttgtcttggtgccttggagctttatctgtacatatcttgcaaatattttgttaaattaatgtcagtttaaaaattatttaagacagcatatagaaatgtaattgatttttgcatagtgacctcatttcctctaactttgctacattcacttattggctctgggagctgtttgaaaggtttcttaagatcctctatgtgtgtaattatgtcatctgaaaatacatacagtttgacttctttatttccgatgtttatgtctttaatttctttttcttgctttgttgcactgcgtaatgtctccagtataatgttaaatggacgcaatacagctgggtgttgaagccctgatctgagtcaaggatcaatgacagggaacattttatctaaatctactaagtataatatgtgctgtgaatttttcatagatacccattatcaggttgaggaagtgcgcttctagacctagttttctgagagtttttctcgtgagttcttgttggaattcgtcagcggcttcctctgtgtctgtggaggggatcgtacagctgttcaccctgttcagatggtgcatcacatgaatgatgttcagatgttaaacagtcttgcatccctgtggtaaaccccagctggtcatggtatattacccttggatagattgcgggattttacttgcatttcattgaagatcatctcacatgtgttcttctctacctgtgggagacagccacgccctctccaacaaggcctaaacctcactctatccacagaacatagccacgccctctccaacaaggcctaaacctcactgtacccacgggacacagccacgccctctccaacaaggcctcaacctcactgtacccacgggacacagccacgccctctccaacaaggcctaaacctcactctacccaagggacaccgcctctctccaacaaggcctcaacctcactctacccaagggacacaaccacaccctctctaacaaggcctaaacctcactccaccggtgggacacagccacagcctctccaacaaggcctcaacctcactgtacccacgggacacagccacgccctctccaacaaggcctcaacctcactgtacccacaggacacagccacgccctctccaacaaggcttaaacctcactccacccgtgggacacagccacagcctctttaacaaggcctcgacctcactgtacccacgggacacagccacaccctctcgaacaaggcctcaacctcagccctacctggggcctcctccaggtgctgggattacaggcatgagccactgtgcccagcccttgatttcttaatatactaaatttttaatttccagggtttaaaaagaatagcttctagttttcttccaaaattgttcactttgtcctttaattccttatacatattaagtaagatgattgtcaagtctgtgcctggcggctccattatccaaatcctctatctctgtcttgtcagctgcttttcttggtttcaaacatatatacagttttccagtaattacctgtttttttttttaattgaatgctacaaattgaaaacggaaattgtacaggtatttggggtgatttgaggctgtgaagtctgaattgttttgagtttctttttcctcctacgcgccttttagagtctcagctcaacaactgaggagtttccccagatctgcttctccttggcagtgcatcacctcctgctgttgttccccagccccatgagcctgccgtgatctactcagcgtccctgctgctgggtcccttttttggagttgccagatgcttccaagagaggtggccccaaacgaaagctcaacccctggcttcccctcctcgagtcttggccccataatttctcatagcctggctgcctttccttgcttctaaaatattcccgaacatacacacagcctttctagctgttctccaggtgagaatggtctgaatcacctcatctgccgttacccgcaagggagcccgtgctgttctcaaaaccctaaacctgtgggaaccacacgcccccagatttgtgcacgtgatttggaatctggtgggctcagctttttagataatgcccagtggctgcacgtgagggtccgcaggcacagagttggacccacgtccccagccttccatgtccagctgggactctatgtggctctcttgttcccgttcctgtccctctgccctccagactatagcactgcagcccagctgacagagaggccgctcctctacctttaagttgcaaactattcagaccaatatcgtgtattataatttgtaaaccatgggttttatgcacgctaaaatggactttaattatgatcactcaaagtctgtaaatggctataatattgggcactgtgtagtgagaacatcaggtaatgttacagagcgctgaattgtacatcattttaaataaagagaggctggacgagaatatcacaggaatgcacgtttccttggttcagagcaatattagcttaagaaaaagtattttcactggtttcacgaaaagttatcacctggtgcattatttcctgatcttcacttcgaattgttttctttccccaaagagttgtatttttacaatgaccgacatgtgtgtgtgctttatgtgtaaggtttcaatgcagcgttcattgagaagctggatgaactcatcacgcttttgcacctgctcagattgctttcagtaactctcctgttactccagcccccactgtggagaaccactggtctgagatagacatatatagcttccctcttactagcaacctagccattatgcactgacctggattttcaaaagaattatttcaaaaaagaaattgctcagttcacctcccctgaccttggcatggaacctttgtaagtaattaattatttgcagtaagtaagtgaaccagcccaagcttctctacaccgtcattttcatagtagtcatttaaatttaagtgcgtgtccttctttaactgaatttaatctgagatgatataaatttttaaaatcatacagttttgactcggtacggtggcttatgcctgtaatcccagcagtttgggaggccgaggcaggtggatcacccgagctcaggagtgtgagaccagcctgggcaacatggtaaaaccccatctctaccaaaaatacaaaaaattagctacgtgtggtggcatgtgcctgtggtcccagctacttgggaggctgaggctgaggtgggaggatcgcttgaggctgggaggtggaagttgcagtgagctgagatcaagcctgtgcacttcaacctgtgtgacagggagacctcatctcaaaaaaatttttttttcataagacagttttgaaatatcttcccttttcaggaaacttgctgtagcctccttcttatttaaaaaaaggggggaaaagttttgttttcctttaatacgtaaattgtatgttttccgtgtagattattaagcacataagcaaaaagaattaaaatcatccattttctccagcatgccgggataaccattattaacactttgtgtatacccttccagacttttgtctaagtgtattcttgggtatttttttgattttgtgcccaaagagataatctaggggaatggccaccagagcgtttcacgagcttcttagatgatggaatttgggatgatttgtattatcttgttttcttttttatcatcatttgagtacttttagtgagtttgtcctatttcttggaaaccgtagtttttcatttaacattttgtttacatacagtttgacaatcattcagtggggattcacccattggctcatcgtatgtatgcggcacctgttctgtattcaacgtttcatgccatcaaatatgtacacggcatctgttctgtattcgactttcacgctaagcatcgtaacagcaagatgaagaaagaatgtagtcctcactttcagagcgctccaagcctcagcttagacacagcctaggcaacagtgtctcagagacattcacagctctctgggcaggcatcaaaggagcagccccaagcagggaacccctgggttggtgtgggagagaccccaggggagtgtcctgagaggaggccggacttgagccaaatgataaaggatccataggtgtcccctaagccaagaagacaggagggtggtctgagcagagcacacaggatgtttgagaatgacaagtctgacatggctggaaagcgatgtatttggtgaaatagaaagatggggaggaacagaaaatagcaccaggaaggtaaacatgcttgagttactcagcctccaccatggcagccgcgtgactgtgctggggagcagacactaggcagttaggggtgcacaaggtttgttggatgtaacacctggcagaggccaggacagaagctggacctgatgtacacctggcccaggctctgctggccccatagagagagagctgtcgctccaactcagaggtggcccagcctctgcaggccccgtggagagagagctgccactccaactcggaggtggccagactctgtagctcagctgtgctacagggccacccagaacagagaaaggcctcatctgaacactggcccagtccctgtgcgtaccagctgggactgtccctgtaccgcgctttttcctgccaagggcccagccccgtgtccacaggcagcagacagccatcggcatcagtgggagcagctgttttttaagtggggaagtgacatggcccaggcctgtggactgtggagatcacaccatgtgcttaacgagctgccgggagctgtgagattgatttatgtcaaggaaaacaagtcattatccatgggaatttatctagctacacagaaaattaacagtggaacaatggcgggtaataaaagaaaaagaaagtaagggattcgttgagcaccaaagaaatttagaggaagatctcagctgtcatcctgtgctggacagtccgtcacgtgcagagcatcctcccgactggcgaggtggcttccacgtgccccgtcaatcagggctggacagtccgtcacgtgcagagcatcctcccgactggcgaggtggcttccacgtgccccgtcaatcagggctggacagtccatcacgtgcagagcatcctcccgactggcgaggtggcttccacggagcgattctcgagacccgaggggcgtggacacagcttctacgcaggcagtcggagagccactgggctcttggccctcactcctccagccagaggagttttgctttcctttgtcctgcataagattttgtttgagtagctaaaaagtaatggaaaaccaccacaatgatcagtggagaaccttgtatgtttgggggcccagctgtgtgttaagagccatcagcctgtgtagcgtgagccagggcagaagggcctggcccgagaatgctgtctggacgcctggcaggcctggctgcagggtgccgcagaggaggtgggaagaggcatctttgggaggcctggctggccccagtgcaggaccagagagcagctgagggcctggggcctccggggtttcgagcctcagtgaaacgcgaatccacagggactcttggagtggggaccagcagtggagaagatggaggcattgcacttgattttacacacgttccgcttgagctgtgatgccaggcaagccgagggtgaagggaagcgccttgtcgtgagacctggaaggagcagggctgccgctggagcagatcctggggtgtgaaaagagctggcgacgcagtgctcccagaggtcactaagggaggagccgggtgccaggggagagacagtcaggatttgcagattcagcaaatgaagaaaggcaaggctggccagccactggagtgagggggcttgggaggaggtggcttggaagggcggtgaggacagaaaccagctttcgcatggcaggtaagaggagcctacgggggccaaggagagcttagctagtgccagcttcagggccacatgggttttccccagggtagacaggcataaggccccagcggccactgcatgttgagccccagcagccagtggtctccccggcccatccctggtcctcccattcctgcgaggcggctgcggggtctgggtctggtttctgccacttgtctctagtggaagacacaccctcatagagcctcagtttctccatctgaaaagcaagtgaacataagacctgcctggcgtgggcattgggaaggaagtcttggtggacttggcaggtgggtgacttgggggcctgggtccaccgagccgcacagcgggaggcacggcatgagtgcccagctggcagcggtggtggaggtagtgtaaatgttcatgctgaagaaaatccaagcctctgagaggctgggcagctagtccacagtcacagagccagtctctggccaaattcaagcccccgtctgtctggctcccaagtttaggcctggaagtgaaggaaaaggaaggctgggggttctgcaggggagacatcctgatgacctcacagccccttgtccttgtcctctgcatggatggggccagggacggcagtgaggcggccaccccatggggaggagatcatgtgttgcgtctcctgagtgcagacggagctgaaggcgcccccgagaatccaggtgagagcaggaacctggagagactgggaggcaagcacctgccacgtgggcacctgtgagtgaaccggggagggacagggccccaaggagtgggtggcacctcatgctggaagtggggagcaggcagagtgatggggcaaatgacagggagccgggcaggtccgggagaaggggtgggggagggagcacccttgggagagtgactgtgatgggctgtgatccctcaggcatctggtggagaatcaaaggcgagggctggagacacagcagctcttgttgagtgacaagttcccagcagagggtggtggtggggacagccaggggtgtcagggaagaagaaggggccttaggggaagggcacctgcttggcatttcggagctggcctggcactctacagtggttgcacaaatggggtgtggatgctgaagttctgccagagtctagcagggccggggtcatcatgatgacctggatgttgcagtaaggaagataaatcctggcaagaaaccgcatgccacaggtgagcccggaagtgtgggggaaggtggagataaaccctcctgccaatggcagtgaaggagagtttgaggaggcgcgggccctgttggggggccaccccggcatctgccacatctgttgttggagtgtcatctgttttattttagtcgccattttgcatcagggtcagctgtgttgactcagcagagaaacaggtaccacgagtcatccagccatagcacggctgggaccagcgcttgagttttcttgtctcccaattcaggagtcttttcctgaactgtagctttttacagttttcacatagaagtccttgattaacactctgaatttaaattttaaaagagccaccttgatcattaaccctttgagggttcagagaaacttctagaatgaaacatggtctgacatggacaacatacaccaataggcttcttctgtggtcccctcgtgatctcagtggcctcccgagttgggcaagactcagcattggttaggatcaggtacagaaaggaaatcagaaacaaatcgtttctgcaaggatttaattttatgtgacgtgaaaagtgagggatgctggactcggttccaccttgtcacccccagtaggaccaggcctgctggatcaagaagcctcatcagcttttgctcactggatggttggttcatcgacttgaatgatttctgggtctgtctgaagtcggctgggcagatgactctgtctggtttcacgatgagcttagggaagagaccagtgggattttcaggaccatgttgggagagtctagctttgcatttatttactggtgatcatcacaagataccaatttgtaaaaacacaactaagtacacactggtcctatctggcctccgtttatcttgatggcttggccatccagtgacagtgctggggtgtgggacctcgtgggaagctctttgctgctcagaatgcagctttctgttaaccagtggtcacagactcgggaacagcaggggctctatgagcttcagtcgattcaggatacgtgggctcacgttagggatgtgtttagtcctggtttgcaaacagcctgcgggcaaatggtctgtctgtgcttgtgatggtccctgcacttcttccggaatgcagccctggcccccgccagctgctcgagctgtgctgcacccctaggctccctccccagcatcaccagggccaaggatgaggagatgcaggagccagggttttggcagttccctgttactcaggtgggcacactcattgcagtaaatgttgatgtataaagacaaggaagggtatccccatgatcgcattttgaggtttttcctccaattgtttctccttgcacatgtttgatgtaatcgtgactatagagtatttgtcttgcttctttacttaatgttataaagcattgtcccatattattgaaatattcagaacagtttaactgcttgtagctgctgcgtcgtggttgttgcgtggtttgtttaatcatttccctctcattggtttcggagcgaattttgggctttctgcaatggcagatgacacagcaccacacaccctacatcccatttccccatcttgcttccggtttaggtatggttggttcctggaagttgatgtactgagctatgtagatttttccgacttttacatgtggtaaagaaggtagtgccagcgcacgctcgtacaggatagaagtgtttttgtttagggcagggacagacacatccagctgccttagaatgggggctctgcacaccagaaagaccagctgtgtaacgtagagtgtggactttgagtgatgcagtatcagtcactcaatcggtcttgtctgtgtgactctgaatacacagactccgggcacttcccaggctggcagtgctccaggcacgttgttacagtcgtgctgggagggtaacatgtctgaaccccatggagcgaggacctgagctctgcagttggtgttgggccccaccctgccctgggcgcctctcttcctgaggcttggggacggtcctctgccctcatagtttgactaactccagatatgttgagagaggagagaacccgtgacaggatgctgaagatcagcaactcccgtgtcctccttccttgcacagtcgggccacttatgtgtttactgatcctaggccacagagcttcggcgtgtggtctgggcgctgtctgtcctctgcatggctttggtaaggagggcaggcagcgctcggtgacagtcctgcagcttgaaagaggcggtgtttttgcggaacagttattgacgatcttgtcagtcatttcattaaaacggttttcagcatatgtgtttctcatctgcaggtgtgggacccaagacacaagtgtgttggggctccatgtccaccccacgatgccccccgtgccccttctccgtgctgtttcctagggctgtgtcccgggcagccacccctgttcgcgctggcgcttgagggctgagatgagcaacctggtaaaatgagttcctggattgtttgcttgcatttcataaggaaatgtcttctctttgggaggtgtgccccaccctcacattcctccgtggggccaagctctgtcgtaggttgttagagggtgggcacctttgcttttcctcactcccctgctcggaggtcggagggcaggcagcctggccattcctcctgcgcacagtggacatgcttgttctgaagcgagagcagactggggagaaggaggaggggctgagacgagtctctgctgtccttgtgccgtgtgttcgcctccaggcctgggtttcttttaaatggtgggaatccttcatgatgcctgccctccaccacccacacagctaatgaaaggggcttctccgtcatccccgtcctggccagcagcctgactagaaaaccctgatgttgggtaaactggtctccactgtggaggtcgaaatttttcttgaatttggaaatctttgtttgagacttccggcattgtttgagcagcagtgctgctttagaatattatactaacttctcaatttctcctttttcttgccctatcactgaacctattttgaggaaataagacgttattttctgttcgtaaaggaaagaaagagcatgtgttgaagaattacattaagaagcttgcttaggctgggcatgatggctcatgcctgtaatcccaacactttgggagggtgaggcgggaggatcccttgagcctaggagttcaagagcggcctgggcaacacagtgggactccactacaacagtttaagaaaagaagttcactgaacttagctaccctgtgttactgatgcatagcctctttgaatattattctgatgaagacggtgccatcagatggttcctgcagtgggaattgctgatcagctaaatctttttgacagcgggatcatgcttatggctctgaacacgtggcatttggttttccattccgagttacttcacttagaataatggcctccagctccatccaagttgctgcaaaagtcatggttctgtcctcacggctgaggagtggtccttggtgctgcctgccccatgcgaaatggcagcagcctcatccccccgcccactctctgtcgtatttgtctctgcgtcatctgccgtcacttgccacctctaatgtgtgcttgttcatttgcctgttacctgtccttccccctagacccttaggacagggcctgggcgcgcgctggcaatccccacatccctgtcgcaggtatcagctgcgtgttgaatacacgggagcaaagtagaccttgcgggcgagactcctcccagcatggacggtgtacttccacagcgttcggtggctgaggtataaccctgcagagcatgatgtggactgctttcagcacgtgccacagactgcccttggggtccagtcatcggtccatgggaaccatgtgtgtgaccagctgggcttggtctgtaagtctggggacaccagaggaagaagctgttttggagatgtgcgggaaggaggaaagctgcagatggaggttgagctctgagctgtgagctcatggagagtttgattctccctgccgtgcgccaagcttctgctcagagccttcctccctcgctcagagcctttcgccgcccgcgcccttttttcttgcaacctctcttccattccctgctctcagagctgtggcatcactcatgagaacgccccttgttttctaggatccctggccgcctgaacgacaggaggacgcccctgggtgaactgaactggatcttcacagccatcacagacaccatcgcgtggaacgtgctcccccggggtgaggcgcgggccgggccttggggagggaggctatggccttgagtgcgcggggagccgactctcggacatgagaggagtcagataggatccgtgagtgcctccctagtgaggaagacagtgggaggggctgaaaagtagaaggcgaccacctaaggaggtgtctgcgagggggtgagttactgcacgccaggttctcagaacggtggtgtggagagactgcgtgtcagcgctggccctgaccggtgcacagcccttactgcgcaccggcggcttatcttcagagtcgtcggcattattcacactggctggaaaccagaattgctgttgtaagacttgtttgtattttttattgattggttgatttggggtgtttgttcacatgtacgtatatgtgcactgtgtgtgtacatgtgtacatgtgtatgcatacacgtgtgtatatgcatatttgtgtgtgtgtatttgtgtatgtgtacacctgtatgtgtgtgcgtgtatttgtgtatgcgtgcccatgtgtaatgtatctgtataggtacacacctgtgcacacacatgtatgtatgcatgtgtgcatgtgtgtacatttgtgcacgtgtgtgtatgtttaagtgtgtgtacgtgtgtgtttaagcgtgtgtgtgtgttgctgatgggagatatgcatattagtcccaactttagtaatttttgatagaagtgaatttgtgtatttggctttaaatgctagacacaagtcactgtagactcctttttatcttttatctgccctcagatctcttccaaaagctcttcagacaggacttgctggtggctagtctgtttcgaaattttttattggcggaaaggattatgaggtcgtataactgcactcccgtcagcagcccgcgtctgccgcccacgtacatgcacgccatgtggtgagtgtttcaggatcctccaggtgccgtgctcccccgccctccgtggcactgtgatgtcatggaattgcacggagctgggcagggaggccccacacctaacttggggaccccgtgtagcattaacaagtgaagctaaatgcagggctcccagagatctccacacagaggagtgggggtctccttcagagggcagaagccttggagggccttttaggactgcacgggagcagcggccggctgaagcctcacagctctgcaactcgggagggtagcactttgcaagagagtttctaaccttttagaaaccagtagtgagaaaataacttgctgacttgaatttatgaagcacatgcaagatcgctctggagaattaaactgttgggctcatgatcaattagtttttatgcttatttctcacacacacacacacacacacacacacacacacacacaacgctcataagtgtaatcctttatgactattgattatagttctctcccattgctgagttgctactatttatacaactcctattagtagtaacagtgacaataatgtgatttgtttttagtctagacattatatttgaagacgtttggtttctttctgttctgtggctgtcctaacaagcaggtttgggcaaattctaaaatggtattaaaacaaaggaaaaatatttctgttcatcaatgggagaaaccctaacaacacaaatatttttaaaagagcgattaacgtatgcctagccgcagaagccatcatgtggcgtattttcatggccaggtttattttagctagtgttttgtgttttctttttaaacgtgtacaggaccactttccctcaaccctggaaacccagagaagcaagaaggaatctaaactcactacccatcacccactccagaaaagttagaaataatctaatttttaatgtttataataaatatttatatgcgatagatcaaaatacattatacccagcatagcacttggactttaaacagcaaaagttaaagcatgcatgatctgtatccttcttaagactctgtaagataaaatagagaaccctgataaggagaaaaggaaattgaagtaaaccatttaaataatgtgtaaataaaaccaccgcacatttatttttcacgaatccatgaataacagagctgtaaaagagacaggtgtttgaaaagcctttgcaatacttagaataaatatttaaaatgaacattttttaaaaataaatacttagagcatttttgaaagagtatattctcaaaatggccttattcctttaagaaaagtaaggccttaaatcctgtctctatttcctctaagacaggttattgtaatacatttattttaaaagaggaaggaaaaagaaaaaaaaagctgaaggggtcagtgccacatcagatcctggatcaaaaactagttcagcactgggagccggttgagcactcggagcggggtgggcagggcctccagacttgcaggttcccttaccaggaatcagtccatggaaacctttttccttctagcgtatgttttctccagatgtaaaagcacctcctatctgatgtgctcagctgcgcagagttaaagacagtgacatcacattggagtccgtggtcaaagaccagagccagagcacagagaggagccaggagggatgagcaggcgaggacaggtgcagggaggggcatgtggcaaggccggcgtggggcagccacatcccacctctccatctagaggccgcgtggcgaggccagcgtggggcagccacatcccacctctccatctagaggccgcgtggcgaggccagtatggggcagccacatcccacctctccatctagaggccacgtggcgaggtcagcgtggggcagccacatcccacctctctctctagaggccacgtggcgaggccagtatggggcagccacatcccacctctccatctagaggccgcgtggcgaggccagcgtggggcagccacatcccacctctccatctagaggccgcgtggcgaggccagcgtggggcagccacatcccacctctccctccagaggccgcgtggcgagttcggcacagggcagccacatcccacctctccatctagaggccgcgtggcgaggttggcacagggcagccacatcccacatctctgtctagagactgctttctaggactggcccctcagaagttttctgagtgccagcatttatatcagtgctgctttatagaaggtccttgtctaggcctagctgcagcctctcccagcgttgctggggctgcccttccctgcccagaaaaaaggccagctattctgcagactctgctccctggagcctcacagagccagccctcacctgtgcttatcggttgcactagagaatcatgaggtgatgtcgcaatccacagaggcccagagagcctggggacagcatcacaagggtgcctcgcagcccctcttcctgacggtcactgtggacactccggcttttctcctctcctggttctgacctccctgagtgtgtcagaggctccgcttgggctaatgtgcgcctttagtgatccagcccgcatggtccatcatcccaccacaagcagcctgcggtgtcgtgtcctcccgcttccctttcgggcgcgttcttctcctggttgttgcagggtgggctgtctgggaagtagacggagacggaggctggtgtcatgacactgctcgtgagtggagcagccctgggtcagcggtggaggggtgggcggagagaagtcaggctcacctccgccggccctggggagctctgaggatgggatgggaggtgagtgggcctgcctgcattctgcgttggttgtcagacataggccacccagaagagggcctgacagccgtgagccacctgcctgtggtgcccccagcagctggggcaagaaaaccttgatcctgaaggggatcccggcccctccctcacagtgtcttgctgtaagagaaaatctcacctgccttacctggggctgctgttaccccagccccattttgatggggcccttgggagcggaggaagcgcagtgcagaggagctcttccacaagcgcacagcccatttgcaagaaacatgtttcctctcctcatccgggaaagtgacacttcccggccggctgtgcagagctcgtcaccaggccctgctgaggcctgtggcagtaaccgcaggtctggactagaagagagcagccagcggcacccggccactgtagcggtcactggtgcagccactgccagcagccagggcctccggcccagcccaggtacagcggagtgaactgtgttcatgtagaatcacagcggcgatgcccttaattgctaggctggggcagggaagcaccgccctggcctcctcctggtccctggcacccttctgccgggtgtcactgtgtccccatggttgggtttgacggacatcagggatgaagactgaagaagaaccaggccaggagtggtgaagggcagggctcctccagtggggtgcacagggtgggcccccgtgccgtcaccgctggccactgggcacacctgtgggctccaccagccacacagctagaactcgccctgctgttgccgatggcctgggtggctttggggtttcaccttcaaccggcagaagaaacattatgcgcttgaatttttttcctttttcttttttaaactcacacctgggcacgcatctgcgtactgccctggcgactgacgtgagcatgaagggagctttagtcagccgctcggcccgcgggaaggaagaggcgagcaggagtgactcacaccaggctcgggctccaggcttcctggcaaagcagtgaatgtgaacacccagggggcagctgtgccaaattgaagctgatttgtgctgaaagaagaaaacctcattcacagattacagaccagtcatggcccttctggtggacgcgtctccctctgcttagtaataggagttcctccagcgccacttgtgggaaatagaatttgaaggtggaaacagcactagggagggcactagccatctaatcctgtgtgacagcagtgtcgctgcagacttggcagctcagaacagcacgtggcctccagatccagttcctgttgtggggctcagccaggttctctgtgcagggtcccatcaggttaaggctgccttcgcagttgagaccacccgccgtccccaccagtggggtccttagcttggcctcccaccactcagagccagcgcaggagccgggtgctgcatcctcacctagtgccacacacagtcacagcagccatcaccgttgccatattctgctggttgaaagcagtctcaggtcccacctgcacccccagggaggggccacacctgggacaggggtcctggggccacgttcaagcctgtccacctcagctggtgaactgtgctggggtttggagagggtgagagtaaagtcgcagagcccagggagcaatctgaccacagctcccctgaggcacaccagtcgcggcgggtgaccacaggtggtcatgtaagaataggaattccagtgactgactgattaagcgcctgctgcgtgttgggctttacaattgttaggccatctccccctcacagcaggtactgccgcaaagctacgatttttactatcaatatgcccattttactgatgagaaactggggtgtgtgaggacctgcatggtagggccaggctgtggctctagccgtctagtgccagcctgccccatgctgacttagcggcgtacgtgctgagtcatgggatgtacgtgcatgagcttctgtttcaggcgcatccctgggacaggagtgcacccaggcagaagtggtgtttaaccagggaggaaagctcttgtcacctcttgttacacatggccactgtgctggcggatcacagcatcgttgtcagcgtgaggaagcttccccggtgtctgaacgagtctgatcaggcagagacgagcagggagtggcacttagcgacctgctgtagtcatgctcctgggagcatgctcctgagaccatgcgaggtctcaggaaggatgtgcgcctcatatgagaaacccgtggcaggtggcattccttgcattttgcagtcagctgcatcccacctacagaacagagccctggggttttccctccagctggacatgagaagctgctggggagtcagcagccctgtcctgggatccgagtcgtcttggtgactcccacgcttcgatgcctggccgagacccgcctggcttgggcctgcccttggttgggacctcactgacctgaggcccctaaccccgacccctgccttggctttacggcctttacagtgctggccccggtggccacccacctgcctgcccaccgtgctcaccctgcctttgaatgcccagcctctttgccccacaaccaatgtgacctggcttaggagcatagctgaagcaggtcgctaaggaaaaaccaagcaacgggactaatgggatgttctgaaagacaaggacaaatcaagccatttgtcagaacattggttataagagggaaaatttgggaataactctactacctaacagaataggaacgtaaattcagaacggatacttaaaagaaaatgtaagcagtcttaaaattttattcatgagtatgcaaaatatatgttaaatgagagaaacagaacaccaaattgcatcagcaatatagttaatatctatgttaaaatacatagtacacacagcaataaaacactaaacagatttataaataaacattaatgatgcttgtgccagggtggtacaattggagtgatggttctccattttaaaaattgatagatattactttggttaattaaaagtctgcctgtagattttctaagccttcgaagcactaaaagcaatttttaaaaatagagtctttatggctaaggcattattgttcataaattcagaactagagacacacagaagaaatcattacatacttctttacatgaggagaatcatgactggtagagtggcctaagaggcaggcgtgggggctttcagacagcagaaagacggggctggtgtccaggagggcgcgggcatgggtagggcagcgcccgggctgtgctcagtccaaccggggctctgcggggcggttttggcccacagttgccagtcatagagtagccaaaagttcatattttcatttttaattatctgattattagatgttgatatctaacgtggcattaaaaaacattctgcgagcccaaccagacacatccaacccgacacatccaaccagacagcggcctgtagcctgcctgttccaagctgggccatgaacccctagggacagaggcttcagtgaagccctcggtgcctcggctcccagcatggggggcggcccgtagacatggcagtgccgcgtgcatggagagggcggcgtccacggcgacttgtggccgagtctcaggatgcttcccccactcttcttcctcagcccctcctgtgcgtgtccaagggtcctctctagttagggatattttctgcaaggtctgacatcgtgtcttcttgtctttctatgctgggaagtgccaaataagtaatattaaagggttctttgtacagaaatcaatgatgatgtgaattcagggagaatcacttgcattttacacatgttctctggggtaggttttcagcaacaaggatgccagcgtgaatctagagctaaaaagtaaacacgagtcagttccatttaatgctgaaaattatatcatgagccaactttgatagggaattgaatgtaaaaattgggctttagatttggagaagatcctagatcctcgtaggagaagaaagactggaaatgtggtctggctggtcaggagccgggacagcaggtcccacgctataggtgtacacagattctccccgctggcttctctgttctgtggcatcttcctggtttcctggagtcagggcagctccactggcctcagtttccagagaacaaacctgactgaggtggacttgccaccttggccactgaccagttccgaccccgccccgccccaactccagctccacccagttctctcatttcctctcctctcactgccaccaaaacattatgtcaaaaaatgggggtttctcagtctgtatcagttcactatgtgtgcagaaaatttatcggaatgactttaacggtagtagaccaccccccaattctgagtgctgacagtttgtaaaaggccctttccaggtgctctgccaaagccactcacgcacggccttctcacggcgtcgggctgctgcgccccacggtgcccccgcgctgggccatcttgcacgggccgctgctgtccagtggcttcgaaaggagtttggtagttgaggtgagaccgcaggtgcgctgctccagtggcttcgaaaggagtttggtagttgaggtgagatcgcaggtgcactgctcctcaggaatggcagaggcttcccatgatggggagcatcattttcatcttttttttttttttcggaggcggggtctcgctctgtcacccaggctggagtgcagtggtgtgatcttggctcactgcagcctcaacctcccagggtcaagcaatcctctcacgtcagacccccaagtagctgggactacaggcacacgcccagctaattgttttgtattttttgtagagatgaggtttcaccaggttgctcaggctggtcttgaactcctgagctcagacaatcctcccaccttggcctcccaaagtgctggaattaacaggtgtgtgccaccgcgcccaatagggaacatcattttaaagcagctctttgcttcccagcggagattccatagcagccgtgtgttgttccgatgtgtgttttcccaaatgcgctacacaattaaggtgcttaggagggaggagaggcaagcacagaggtttggcttgcactagctccacgtccttcccgggtttcagaaaggcatgtacttgcccttgcactgcccagagaccaggccccagcactgcctcctctccattccccacggaggctgagacgattcctcagtccatgtcaccctgagaaaatccccctccaataaggcatttgattctgtggagtccgttattgcagaattttacctccactctgtcctaggcgtgttaacattcgaagtctaattctaactcttagacactctcaccacgtccttaacacgagtgagtttactagtctggacacaggagggaggcttctggaagactgggaaaccccaggccttcttagatatgagcagtccttgctgctcgtgatgaatttcatgcatgactttatcactgtccatcggaatcccgccgaggctctggaggcagagatgtcagatctctgatgacagtgaacttccacagagggcagcagcatctccctgtgtatccttgtgtatcactatgtatccctgtgtgtcactgtgtatccctgtgtgtcactgtgtcactgtgtatccctgtgtatcactatgtatccctgtgtgtcactgtgtatccctgtgtgtcaccgtgtatccctgtgtgtcaccatgtatccctgtgtgtcactgtgtatccctgtgtgtgcctgtatgtcaccgtgtatccctgtgtatcactgtgcacacagtaaaatttaacaagaagccagtccattccaccatgttaccatgttgcagatttagggaggcgtaaccacacagacttggtactggtcttgattgtggagggcctttatgctgagccagagatgaggaagatgttggtgcctggctataagggcttgagccaggtggatacggagggcatgcagccaacaccgctcttgagacaccggctgggttagtgtggaaaaactccattgaatggtttgcctttctccctggaggtagttaggtgtactagttgaaacacccattcattgggaacccgtgatccaggggctttacaaatgggcatgtgtgagcataggcagcataggctgccgtggccccaggtgtcagggtgcaggcggctcctgtcttggaggcttccatcccccgtggaagctcgtgctggccactggagcaacattcccgcaggtgggaaggccgcgaggagtggacgaggcagctcaggcctgggggacagacttggagctcacatgcccatcgcccccctgtcctgtggcagtgtctggtccagcctcatccagggagggagggaatgtggcctccaccttgagtggcatgtcccagctccaatgctgttccttaacaagggcagggagggaggcacaaaggagtgaggagtggtttcagacgctcagacggagaacattcggctcagaaacagaatcgtgctctcctctgttactagattttgccaactgcaactgaggactgagctgctgtggaggtgggctcctcaccatgggagcatcaccgggggctctgcagggctgtctgccacgaaaacaatgcccagagctctctcctcccctcatcaatagaccaaagtgtgtacatccccagggagcacacaggaaagatagcagaaaagagcatttggaataaataatgtacaatctagctattatactccttgggtggtgatggagaggttgaatttttagcaagaggaaagagggaacaaagcctaacaaacattgaggttaaaacatgaagtcatctgcatttacactttgcttcaggccgcggcagtaatgaatactcagagccggctttctgtttaatgtttgatgcaaagtcaccggggagtcattctccttcactttcaatttcaggggtcctgaaaccctgcgtttctctgcggtaataacccgtgctttccgttcccggggcgggcgcgctctgactgatcagcgcagatggaggctgtgcggacttggacttggacggttttcctccagcccacctcctgggcacccgccatctcagggctgtttcctgaaaacccagctcttgcctggatgacatgttttccaggcgagtgactcatcagaacagccaacagcttagaaagtccctctgcccccagctgctgggggggaggagcccacgatgcagatgagctggtcacagctaatcacagcctcctcccctcagatctgcactccagcactccagccctgcttctccaggcagcttgatcgcaggctgtgggaagtgctaatccagacaccttcccggtcccctcccaccttctgctgtcgtgtgctgccaaacctcacagggctggctgctgccgccgaagcccaccaccatggcctctcgtgtgtacgtaggacccactttcccacttgtctttagctgggaatcccaaattagagctgcaagtgtgtgttgattttaccgtagaaaatgcagccagttttaatcaacagataaatgttcattagagaataccgttgttctgctgtttaaaaggttgccgtgcaggccgggtgcaatggctcacgcctgtaatcccagcactttgggaggccacggcaggcagatcacctgaggtcaggagttcgagacccgcctgaccaacatggtgaaaccccgtctctactaaaaatacaaaaattagccaggcgtgtggcacattcctgtaatcccagctactcaggagaccgaggcaggagaatcacttgaacccgggaggcggaggttgcagtgagccaagatcgcaccactgcgctccagcataggtgacagagtgagactccgtctcaaaaaacaaaacaaaacaaaaggttgccatgcgattttagaatttaatgggtaatctggccctgtaatttggttaaataaataaataaataaaccacccacggccccgagagggcctctggcttgctcagcaggcggtgccagggtgcaagctcctcccagtacctccgtcttccctgccttgctctgagtggggctgtccttcgggcccaggccgagctgtggcttgaggttcagggccgcttcactgtgtgctgataatcgggttccagcgcttgtctttcagcggtttgtaggcgttcttttacatcctttcttctcattagtacttgaacaaagttattttcctcctctcatgtagacagctctgcctcgagtccacagccctgggtagccggacggccccgagcagcctccgtgcatcgtctgggcgccgagccacagcccttcctcctgggctttgtgtcatccccgcagcctcctgagcctctgtgcatcagtgaaaccagaaccatctggggctgcttttctggtctgaaatgtggagctgggtcagtccccgcctcccaccccggggctggatccaagtgggcccccagccttttaggagcacatgtcccactgcagcaacatgggtcacgtgtccgagagagattgtcacccgtggctctgacacagctttgctgggcggcatcctgtccggtgtgctgagcgatgtctccagtgcagttcaggccttcaacaccaagcgagggccttggagaacgtgcgaataggctttccgggaggcatggttccaaaggcgccttgcccagcactgaccgaggccacaccaggtgccacgctggtctgctcggcccacggcccggacaccctctctgccctcctctcgcctccacctcccctaacttgcacacactttcttctaactcctgaagcagaaactttttatttgattaaattcgaggaatctttatagagtttaattgcaataattgactttgcttctgtcttaacaaagagtaaaatctccctcaatgctgctgaataccatttgcctgcagctggggatttactgggcatatgggagctatttattgcacgtactttgaggccttttgattatctcctgattgcttcttaactctgttggcaggggaagggcatgtttgtgcaaagagggccagtcttgggaaaattgaaatatatttcatatatttgaaagtgaaaaattgctctttagtccctttgttcatcttaaacttttacttttttttctggattttaacatttttcattctcattttggtcctttactaagacattgagaaaatatgccctttgacacggcagcacggagtgtcattaacctaaaaaataacacagagtcctcgagtctcttagaaaattacccaggagaagagagcgcagtgctagaagcagaatccagtatactgatcatcactcggtttccacaaggaacatatttctagcagaaagggagagtagggctgaagggattgctgtccttcctccatccctacgacgaaggttgagtgtccctaattcaaaaatccaaaatgttccaaaatccgaaactctgtgagggccaccacgctgccacaggtggacagttcccctcccgaccttgcgggcgcaaactttgtttcatgcacaaaattgtgtaaaattcgcttcaggctgtgtgtgtaagaggtatatgaaacatacatggagtttactcttagacttgggtcccatcccctgatatctcattatgtatatgcaaatattccaaaacctgaaaatatcggaaacccaaaacacttccggtcccaggcattttagagaagagatactcaacctgtatccgcggagatcaagactgtgttctgtggctgtgctgagagcgaggtgatgattcacttccagttgagagttcatgttggatgttgtggcggggccacagcagctgcctccgactgacccctgctttgtgtcagccgctctacgaggacgctgtgagggaggcatgatcataagcccatttcacagatggtgaaacggatcctagagagagagccacgcgcccagagccccagagccacacgctgaatttcaccaagcagcctcccacacgggctccctggtcaggccctcatcctccgggcgaggcagcgaggcaggcaggtcagccgctccctgggccggagctagtgggtagcagagctgggagcagagcccaggctcatggctcccggtcagatcttttcttccctctctccttctcgaaagtcacacggggctgctcatgcacagagggtgctttcctgctcgccctcactctcatttagccaatgcatattgaaagcctgctatgtgcctggcactgggaaagaagttgggtacggctggatgccagggcacctgcaggatgtctgtaattcagcgtgtggctctgcggccttgggcgcgtggctgtctctctagggtgaaacagtctcatgatcatgtctccctcacagtgtccttgtagagcagctgacacaaagcaggggtcggtcagaggcagctgctgtccctctgccacagggctagagatgtcagaggtgctggggtgtgccaggcctggggtaccacgagaaggccagagccacagaaaggcttaggggggctgtgttagagcctccgagaaagctcacagggcagctggcctggagggaggtgccggcagaggggcccattgggagggggctgttaggacaacaccgaggctctgacaaggccatgtcaggaaagtggcgatggtggctgggggtgccccataaggctgttgcctacacctgggaatcccaggaactggcctggaggtgtgaggtccaattcagactgccggctgttcctacagtagaattggggtgtggagctctggggagaggtgtgaggctattttaaatagcgtctgggggtgtcggtgagcaggtggcattgggcgccctgagcaaggatgagagcaggcagggaaagggctgtggaagctgcagcagtgcggccctgaaggacggggtcgggagcccggggaggaggctgtctcacgttcaccgtgacgggaaggaggccggaggagaaagcctcataatgtccaagggggagaactcaagagggacagtgtggtcggttactgtgacaaggggtctcgacaggggaagcacatcaccggggtcatctgtggagccactgtggcttggggggagcagctctatgcatggtaggagaccccagactgcagggtgcctggtgagacccacagggaggcagcaggaactgactgagcaggtggctgtccacaccagggagcagcaggggggaggcaagggagggacagggaggggcctgacggcaccatcacagcgcagagctcagccctgaccgccaggactcctttccctgactgcatgccgacccctcctgatgaggcactttgggcctggccctggtgtctctcccgcgtccctccaggacgctgccccatcagagcctgcgcagggaccacagctgcttagaacacgtgggctgccagtacatgggttcaagtcacagtcagaagccacagcagaaaatgggaagcattcctttatttttccaggctttttttcttattttattttaaagagaaaaaatgtgacaaaatggtgaggatgctggcagcgccagcgttcccggcctgcactctctcctggcctcccctcggacgtcttctgcagcccaaatctgaacagcagtgaaaccgtaaacatgccccccaccagctgccgtggcctccgcccagacccttgctgcccaggctcagccggctcctcctgtgccctgtgaagtggcctcgtgtggaagcccgtccataatgctcagtggatttcctctgttctctccgcaggcaagcctgggacctggctgttgacatctgtctgtctcagctgccgacgatcatcgaggaaggcactgcgtttcgggtgagtccctccaagggcaccctgtgcatccgcggcggcagccacttctctgggcacctggactgcaaagcccccagactgggggtggtgcccaggactctcgggtgtcagattttgttcacctgcctggaaaaaatgtagttgccagagtttaaaacatcgagtcaaccagggtttaaagttaaactttgaaagaatcaacttttaaaacagtcctatctcaaaattttgctattacagatctacttttcttaatgcggactcactccctgtgagtggtgatcctgttacactttctagccttttcaccacagacgcgttgtggatctcccccaggcctctgactctcagccctgtgggacagtgacccacggggggtttggtgctgaaccctggagggcgttctgcccccggccgcactgcacgggcgctggagagctgagccaccctacggcggaacctgggtttagtcgccgcacctgcaagtgagggtggccccgggccttcgcggcagctccctaggaccccctcgtggtttcttaatgagcttttgccttacgtgaggcgccaagtctgaaaatagataaataagacggaggccctgccctccagaaacccgtgaggaaagaggagcctctcacatctgtgcagaatgcaagggagcaatcggcaagagggcgcggcagacacggggaggccagggatgggggaggcggcagcctgggcagaggcaggaggggaccagcatccccgcctcccgttggggccacacctgagacaccaccgtgtcaggctccagagccacagagcctagctttgccaccgagggcaagtttggtcgtctcctcatttaagggagggattatggtggtatccaaccccaggggtgctggaaggacaaagggagttaatgtaagaaaagtgctttggacagagcccagcacagggcccttgggaattcatgtgcaggcactgccccagagccagctgtcactgatgtgaggatgccaccctccagcccagggcaggggcaccgatggtcaggaaggttccgtccactgcacagacttttaactttcagtgcacaccacagccgtcagggaagcttttaacacatgcagtcgggagcctgggtgtgcctgcgtgcgtgcgtgtgtacgcgtgagtgggtgtgcatgaggtgtgtgtgatgtgcctgtgtggggtgttttaactcctcagatgattttgacatgtcccacgggtgggatgactgggaaaacggccttttaagagggctttcttttttataatcttctgttaccctcccattattgcttgatttttttggtaacatttgattgtgaaaattttcaaacctacagcaaagttggaagaaatttacagtgagcaccccatgcccaccacttacttctaccccatctttgtattcatggggtattttcaagggcattgcagaccgccccgcattttacaccgtgaggcggaagccagctccccgtcatgtgcttggcatcaacactgggcttctagacaaaggccttccctcccttcctgctggaccacaaaccttggggggcaatgacagggtctcctgcagagtggcaaaccttcacagacgccagctgtccaccctcagcctgccagagctgctttcagagtgcctgcgcttttccgaagagctctgggcctgttgccgcaaacagatatttggaaaccttcgggaaactggcctttctgtactctgagcgtggcttcactcggtacttttaagagatcagaataatctgctcttatataaaataatgcagtttctatttgcatgtgtgctctttctaaacgaatacttaggtttctgtgccaggtatctttgccaagtttcttttcaaggattttactctatctatgctaaacaactagaatcaatattctgcatttgggaatgatttcaccatgttggggtgtcaggacaagccggggataactgacgtggaccacacactaggttccttttgtttttaatcttattggaggtgtaacttacatatagaaaagtgtacacatcatacacatacagcttggtgaatgtttcaagctgcacatactcgtgtaatcacacccaaatcaagcagccccatgagccccctcggcgcccctcttagctcctcccttccccagcagtggccgctttcctgcccagttttgtgcttggatgcgtggagtcacgcagggtgtagtctttgtgcctgcccgctgtcactcagcattgtttgagtaagctcactctctctgcaccgcagctcacactcaccgcacggcagctcactctcaccgcacggcagctcacactcaccacacggcagctcactctcaccacacggcagctcactctcactgcatggcagctcacattcaccgcatggcagctcactctcaccacacggcagctcactctctttgcaccgcagctcacgctcaccgcacggcagctcactctcaccacacggcagctcacaccacggcagctcacactcaccgcacggcagctcactctcaccgcacggcagctcacaccgcacggcagctcacattcaccgcacggcagctcactctcaccacaccacagctcactctcaccgcacggcagctcactctcaccacaccacagctcactctcaccacacggcagctcactctcaccacacggcagctcacaccacacggcagctcactctcaccgcacggcagctcactctcaccacacggcagctctcaccacaccgcagctcacactcaccgcacggcagctcactctcaccacgccgcagctcacactcaccgcacggcagctcacactcaccacacggcagctcactctcaccacacggcagctcacactcaccacacggcagctcactctcaccacacggcagctcactctctctgcaccgcagctcacactcaccgcacggcagctcacattcaccacacggcaactcactctcaccacacggcagctcactctctctgcaccgcagctcacactcaccgcacggcagctcacattcaccacacggcaactcactctcaccacacggcagctcactctctctgcaccgcagctcacactcaccgcacggcagctcactctcaccgcacggcagctcactctcaccgcacggcagctcacactcaccgcacggcagctcactctcaccgcacggcagctcactctcaccgcacggcagctcactctcaccgcaccgcagctcactctcaccgcacggcagctcactctcacagcacggcagctcacactcaccgcacggcagctcattcaccgcacggcagctcgctctctctgcaccgcagctcacactcaccgcacggcagctcacaccgcacggcagctcacactcaccacacggcagctcacactcaccacacggcagctcactctcaccacacggcagctcacaccacacggcagctcactctcaccacacggcagctcacaccacacggcagctcactctcaccacacggcagctcactctcaccgcacggcagatcactctcaccgcacggcagctcactctcaccgcactgcagctcactctcaccgcagggcagctgacactcaccacacggcagctcactctcaccgcgccgcagctcacactcaccgcacggcatctcactctcaccgcacggcagctcactctcaccacaccgcagctcactctccccgcacggcagctcactctccccgcacggcagctcactctcaccgcacggcagctcacactcaccgcacggcagctcactctcaccgcacggcagctcacactcaccgcacggcagctgactcaccgcaccgcagctcactcttaccgcacggcagctcactctcaccgcacggcagctcacactcaccgcacggcagctcacactcaccgcacggcagctcactctcaccgcaccgcagctcactctcaccccaccgcagctcactctcaccacacggcagctcactctcaccacacggcagctcacactcacggcgctgcagctcacattcattgcaaggtggacaccattgagtgtcccaacattcatgtgtcccttctagggccactgggcattttcagttttcagtcctcactaacagtgctggctagagccagactctgtcacatcagagcctgagacaaaagggaattctgtgatattggtcctccctttgaaatgtcgatatcttcttcagtatggatttttgtattaatttttatttttgtaaatattgcactgaaatatcatttgtcttgattactgatttttttttttggtaccccacctgctagcaccaattctgtgcctgaggccaaggcctccccttcctggctggcctcccgttcaggggctgctccctccttcacatttctcggagtgatccttcggggtcccagggtttgcccatattcagctttaacagatggtgccagagcactctgcaaagtggctgagtcagtttacactcctgcctgcagcattcgagagttttagttgctatgtatttatttggctatgatggttcagtatgaaaaggtatttccttaagagctaatcgtgtatttacccgatggttaatagagcattgttctatacttgtactggccatttatggttccggcttttggtatcctgttttatgaaacctttatttcctctgagatgagcattctgagcagacgctacgctctttgtcagctagcagcttgtgtgtttccctttcacatctggacctgcatctgctcacatttcacgtcccccgtgaatgctcggcttactggtggtgtttgcactgaggaccgtgtccgcgtggctccctctgttccctcctttgcaccaagggccatgttcacatggctgcctctgttccctcgtttgtccctttgctcacttgttctttgcaccaggaccacacagttgtaatgacaaactctacgtgacactttctaagctggtagactaagtcccacaacttcgtttttttccccgagtttgcctcagttacttttggtcctttgcatttccatgtgaattttaccatcagtgtgttaatttctgcaaagaacctgctggatttttgttgagattacagttaatctacagattgatttgggagaagtcaccacctctataatattgagccttctcctccctcaacgtggttgtaaatggtattgtttaaaatttcactttctgatttttctctactaacagtgacatagaaccctataaaaattgaggttttcagaggctgaggcaggagaatttcttgaacccaggggcagaggttgcagtgagccaagatcatgccactgcactccagcctgggcaacagagtgagactctgtctcaaaaaaaaatttttttttttggtttattgagatagtaggagaagccagaatgattcccctgcagtagaaagctcgggctaattgactttcttaggggtgttaaagagaacccttctgcaaactgagcagccgtacagggggatagaatgtccctacagagccgtacaggggggtagaatgtccctacagagccgtacagaggggtagaatgtccccttggcagtgaactttaagtcccctctttaagcagcaagcttgtcgtaagtggcaaatgtattgtgccattgtcaggacggagagtagccatctcagaatgtccagatggtgagaaaggcggcaggtatgctcaggttgttggtagcagaagtccagccggacgggctccacttaggtgtgacttggaggctcccagcctctcagccggccttcccattttcagtctgctgcccctgtttttagaatatgtcaaactgcctagcacacaggctggcaacagagcaaaactcctggcatccaaatcgccctgggagagccaggtatgtggtcctggccgggcaacccagacgctcagcccagcaggacctgtgagctctctgtctcgctgaatggacttcgctcccctgcacgcaggggccagctcaggagctcttcatggggtggagaaaatctcagagatttggcccaaaacatcagccctgtgaatcatgggtggagacacgggccgctctcgagatgttttccggaatatcatataaagtgttggccactcttccgcaggcgcttgctctaattcgtcagcctccccgtggctttagggagcttcacgggcttcaccgcgcacctgccaggcaaaggtgtgcttttccttttttgtcagtttgaggtgaatagtcaggaatttttctctttctgcatggagtagtgactccagcagtgaggaacatgtgaaaatccatcaggcaaagctaatgtgatagaaagaagaggtgtaactatctgaattacctgacttctgttcacagactcaagccttctctaactcaggagaattacgttctcgcgggatgtggaggagggggtacttaacgagatttttttttaaccaatttatgaataattcacacttgaaaacaggaaaatcactctgggggctccaagccagctccacaggttgccctccaagtgtgattaactttctgtaagctggctgcacaggagcacggattcctacgtggtgaatgttctcggctgactttttaagtcgggccacggggctctgcccgccaggctcctctgtggaggctgccgagagcgctcctggacttgggcgcacggaggcaccctgtcctgctcctggcgttcgcctgtccacatgtgtccacattcactggaacccggggcacagccgaccccggccagatgagcggagggagggttcctcccgacctcctctcagagacacgcacctccactgcggccacccaccttccccccgagcaaaatcaaacaacgtagggaagagaggatagtggatgggagagagaggctggtagttgtttttttttttttctttaattctttgtatcgggggctcagggaaggcagagctgtgtgttaagtggaagtgactctccgtggagggaatcaggccggactgctcctgcctggccgctcagttccgagaccttccaacggcagcctcccctgcagccttcacgctctccagccgcaggcccagcagccctgctgcccacctgctccatggcacccaggcgaatccccctccactctgtgcctgcactcacgtggctgggctaactgggagctcgggcccacccggtgtggcccacggagaactcgtgtcaccccctcgaggggccctgatgccgcctgacattctgaccccaagcattttttttggtctccctcacccgcgcgccttctctgtccagctgcaacccctcctcccgccctcaccccagagagtaccctcgtttcccatttcactgaggaaacaagaagcagtcgcatgaccgcctctgccgggtcctccagccctccccctgcttctctgcatctgggcccccttgctttgccgcctgcctggttcccctggggagcagccctgctctgccagcccagcctgtgcttccagtcccatcccccagcctgcccgaggatgccctccagcagcctttccccaccctccgtgcccccagctgggtctttctcaccagcgtcctgtccccattactccacatctacaaaaagcacttcctgaccctacatccctctccagccaccacctgtctgtcttgttcccctttgcaaccaaaaccaaattcaccctgtctcgaaacccctctggctgcgcttttgcccaactccagagcgttcttgctgctgatccggggcccagtcagctctccatccttatctcgcctggcccggtgctggtttgtggctctgccctggacgttgctccctggcgtccagacctttgagctctgctttccctccactgccgggccctcaccggccccagcgcggccccagctcatctccttggtctccatagcagaggctctgtcctgggcccctttcctttctcacttaacttgaaaaagattcacacaccatgactcccaagcgtgtccccagccagacttgcctgctgatccacacactcacggggtcccctgcccccggcatcttcactcccttgtccagccactgtcgtgagcaccacatgtccacagctggttcccagcacgctcctcttgcggccccagctcggtgccctggccaaaagccttggagtcatcctcagctgctctcttctcctgcctgcctctggtcccttcgtgcaccccgcaggctctccctctttggcatgcccagagcgcccgcttctcagccgcctggcatcctcgcggccctgcagggcgggcccttcgtgaaggcttggatgcccggcaggtggcaggggtgggcaagaccaggccatctgggaacatggccctaacaagcacctgttctgcttgccccgcagcacagcccgttcttcgccgagcagctgaccgcattccaggtgtggctcaccatgggcgtggagaaccgaaacccacccgaacagctgcccatcgtcctgcaggtgagtttcttcagaccgggccagacagccgaggttcctcaggaaggaagccagatgcctgtacagccccgggagtgccttctctctccctgagccctgtgggtctgtgacatcccagcccctctgccccgaagatgatggtgcatgggcaggtcgcattcgggcaaacggatcacacagatccaatcaggagtcactgggctgatcgcacattcattcctaaagggtttcctctaaagccattgatttccctcctccaccctcagataagtgtaactttgggactggggagtcatcagccagtccatcatccccctctcccctggctaccatttccactttaggaattgctgagattcagctacagatgggctttgcttcagagcaggctctcgacaccactgcctccttctcttgggaaggacaggagatggcagtgaatccgggagaggagggaggaggctccctgagcggatactgaccggcgaagcgggcagagcggctttgtggcccagcgccgtaggttatgcactgaagcacacacagatccggaagccggcagcccttcccttgcacggggctgtcacagctgctgtaacaaataggcccttttggggcacgtccttcagatgccagtgcccacggggcccgtgtcatgtcagtgctgttcacgtgcagaccatgacctgttcatgggttgggaggtcagcatcgtgggtcctgctggctggtttttggtcactgagataggatgggaggccatggaaattgaggagttcgtcacaggtagtgaagttagaaagattccacagaacttttgtttcggtgaatgtgtgtttgtggggaagtgtgtgggctgagtcagagtcaaaggagtttaaaatccactggtcagtgtagatatcaaggtctaagaactcactttaaaagctggaaaagtgtttttgtgattggggtggtgcagttggactttggcgaggagctgtgcatggccgtggggaggggctgcccagcagcaggcagggaatgagcaggccccgccctttttggtttaaagctgggtgactccccccacacacaggaagagccccacctccgggtgtggtgctgagttctgagagtcggcagagttgggtcctcgccttcctagaaagcagatcgggtggtggtacctccatggagaggggcgtgagtggcgccgcccacctgcccttcttccttccagagctcgtgctttctggttagggccgctcaccacactgacagacagcacaccaatcttcactagaccaggtgttcatcccacctctgagagatcatttagaaaaccggggccagtttatctctgtcacggccatggcctcagcagccttcccttccgccgttcagtctgtgctgcagcagtggcagccagcgtcgcaggcgtgctgtaggactgaggcttcacctcgttcaggactttgccccaagaatctcagccagagaaagaggagttgggagaaggaacagtgcacatggacgtgctcaagacagtaccgccggcctgtcctcgccggcattgtctcaggcgggcaacaaagaaccagtgtgccagccggctgccctggtgttatgatcccagctcctcagtaggccaaggcggggaaggatcacttgagcccaggagttcaaggccagcctgagccacatagggagactccatctctacaaaataaaataacattgtaccacatttcacagtatatatttctgctgctgtcagtatattatgacagttgctttttggacattgcaaaaagaatgcagacgttattactgttcttcctgtatgtacctagattcgtttaagactatcctgagattacagggtgaggtgtaaacaaataaaccagctcatgttcaaaaccaagaacacgcagtgatagcagcaacgcaaccaaacaacatttgacagaagcccacgttttcccttcgtgcgactgtagaaaggcagctggctgtgtggccacgggtgaccgggggtggccacagcgcaggttgcccatgctgggccccacggctcctgttggtcatctgggttaccaggatgtccctcaggagacactggctctcttactggccttcctactatttgagcaatgtgatggagtaaaatcggccctctccaaagcaggacccgatgccaagcacgttaaatccagttcttttgggtccagcaaataatctttttgtaaatggccttctgttgatttctttcaatgttcccttggccacccacactccctcaaggaaggagaagacgtgctggaggcagctttctgatggtgacgtatgcgaagacagctctggtcggagcgtggggcatttcccacatgattttccagcaggtgtgagtggcaggttcctcctccctctggagggtctgtttcctggctgtgcccagccgggatcaatgggcggacctccacctaacacaaaagtagggaaagatgaagtgtaatggggtatcggcttcatttgacgtaccccccgggagtggcttctttctcgttaactcggctcacttccccgcgctttctcttaaaagcctttatttttgccaaagcctgggccctgttatccttaaattattctctagtgccttggcaagtcagaaaacatcacttaagggaaagggagttttctcactcgcttccggttttccgaatccctgccacttcatccctaagccagaggcagtggctggtggccctccagggtcacgcacggtgtctcatcaggtccggctgattcgcagcccctcctgtaaacgtgagcatggaacaggcccttcctgctttccagcctcaatatcctctctgccttttaaaaatataaatcaacagaggaacaagaaggaagatacaatgtttaaaaaaattgctgttttgcccagacccttgattgatggtgtctatttttttgagatggagtctcactctgttgcccaggctggagtgcagtggcgcggtctcagctcactgcaacctctgcctcctgggttcaagcaattctctgcctcagcctcccaagtagctgggattacaggcacccgccaccatgcccggctaattttttgtatttttagtagtgacaaggtttcaccatcttggccaggctggtcttgaactcctgaccttgtgatccacccgcctcggcctcccaaagtgctgggattacaggcgtgaacgaccgcacccagccctgaacaccgtcttctcacgaggagctctggactctcgtggcctgtggggtgcgtttgccctctggcttcggcagctcgcccggaactcagtgctgtgtgcccccaacaggtggctcaggaagcccaggcaggggaacgaagagcgcctaggttatggaagagaggggagaaagtgacttttcttcttctttctttttcaggaaaaaggtgacagtgatatttatgtgttcatttatttacttggccctttttcttttcaatagatccagggtatacgggtgcaggtttcttgcatgcatgcactgcgtagtggtgaagtctaggctttgggtgaacctgctacccacatagtgggcattataccccataggtaatttctcagccctcagcccctcgcaccttttggagtctccggtgcctgttattccacctgtgtgtccctgtggacccgttgtttagctcccactcacttatacatgagaacatgcaacagttggttttctgtttctgagttattccactgagcataatggcctcctgtttcacccatgttgatgcaacagacacgatttcattctttttctggctgagtagtattccatgatgcacagacgctgcagtttcctcatccagtcctctgttgaggggtgatctcggctcactgcagccggagctccgcctcctgggttaaagtgattcttgtgcctcaacctccagagtagctgggatatcaggtgtgcaccaccgcacctggccaagagtgattttataggatgaagttttagtcccttttcctagatgtcacagatcagtgtgagcatttcattaggaggtctatttgctctctctccgtgcatcattttttttacaaatagaatgtggggtctgaaagtacaggattgttatcaggtgacagcagaatgacaaactagagtgatgttatacataccatgtacatcggggactccaaaaccgccctgctcatcaggtgcccgaggcaccctggcctgcagcacctggcactccagggctggaactggagaatcttttcttatgaagcagctcttccagtatgcctgtctgagcactctcttcatatacaaggcaaatgaaatttgataaccttagcaattctgttttaatttggtcgcctcagctggagtgcagtagtatgatcatagctcgctgcaacttccaactcctggggtcaggccaccctcctgactcagcctcctgagtagctggaactgcatgcatgtgccatcatgcccggctcatttttgtattttttgtagagacggggtttcaccatgttgggcaggctggtctcgacctcctggcctcaagcgatcctccagcttcagccttccaaagtgtttgcattacagtattgagcctctatgccggccaccatgattaatctttagtttgggctaccacaggtggaaaataaatctcagtaactcattcagctcaccatcatttacttctataatttccatagatcgtgggatggtccggaacaggaggtttttgttttgttgtttttaagtacagaaacaacattggctttttttctaaaagccaatcccattttaaaaataactttgctttatgttggcttcagtttttaaaaatcgtaaatcaacaaaaggtggcaggaagatgatgtaatgtttgagaaaaaaaaaacagtacttaacctttccgccaatactctttattgacgatgtttctttgcaaatgaaataattgtagcaccaaatcccatgctgcccaaggacctccgacgccgactcccaggcaggtgggcccccgaggcccccgcgtgtgtttcatcagcacctgcagctcctacagtgggacactcgggaccacatcacggtggtgattgtgaaccagcgtcccgcttgcttttgttgtttgtaaggagcacattctaaggagacctttattgctgggctagtgtcctggtaaaacagtaacaggaactggccttgattagacctcttcgccccgtcctgccactttttccatttgttctgcaactatttaccttagaaacagccttgtccttatttacagtgttggaaaaaaacaaaaagaatcagaaaacaatctttgtaagctttagatctgatgatgtctttgatttctgacgattgcagccatggcgagacctgcctcctctcctctccctgggtcatctagaaacttgagcctcaggcagcctagtgttccctacacacagagagtcagtccttaaaaccttgggtggtggagacatctggtagccgaacactatgatgctgactttacatccgctggacaccttggtgcacacagctttgtgctagacgctttacggactctgcctcattgaactttgagaataagcccaagtcaagtactgttgtctccgtttttcttgataatgatattgaagtttccagaagttaggaatctaagccaattattgggcagagatggaggcagggttaacatcaggttagccggccccagagccagtgcttttcctccgactggcccctcaaacctgagttccaggcagcagtggcatgcgacagcccccgagttaagcataggagagggatccggttccagttcacatatcctgcgagcagtcccacgttcctttcccagcctcttaatcagagactctcagcatcaccagcacggggaacctgccactcctgggtccatggtgaacccagcgtgggagctggctccgggcacatagaagggaagtgaggccacattcccactgctctttctctgcccccaaggctggacatgctgggatcccctccataccccatctgcccctccagcctggctagccacctcctcttgctgccacctgtgaccttccctgtccccctcatcctcctgccagtgctcttctcccaccacagggaagctcctccctctccacggctccccagggcccatgctcctgactcggtggctcctccgtggaagtcgtgctggccgacccccaggagcttgacccaggtggccgccatctcctctcccctcccccgatcctccaccctcactggcctcctcgtccctttcccctgcctctcttgagggttttcaaactcatcccaaaccttcttttctagagtttgctttccttcaccccttcttctctcagcctctggccagtgctgcagtctcctcctccccatctccgtattggcaccctggtcaaacccacccccttccactcgcctccccgacttccagcctcttgccaggcctgtccccaaagcgagcacactggaccagtcactgctgcttaacgtcggctggtggcttctggatctcaaaacaaactgacctctctgcatgccgtcggcggggcctttccctatccggcccctcccccatcactgacctcagtcatactggtagcccgtgcatcctcagacacccgggcttttccagcctctccacctgcaacgcggtaaccccctcatgtcacctccaggacccgctgcccagctgtgtcctgtgcatcttctcctggggggagggaaaacctccgaggcctgcagcgaggccaggtcaggggctcccagggtctgtgtgtttaggcatggtgatggggcggtcatttgtttaatgtctgtctcccaggccacatgaaggatgggtgaggtggtccctactgtctgtggtcactctcctagcacccagcgcagcacctgccccataaacaccccttggatgactggggcatcgtggatagaaatgctgtaggttggagggagtcgatgcacatgccttccagcatagccaccattaaggaaaaaatcaaaagaagtaatgccattaaaagtgtaaagcttggccgggcacggtggctcacgcctgtaatcccagcactttgggaggccaaggcgggtggatcacaaggtcaggagatcaagaccatcctgcctaatgcagtgaaaccccgtctctactaaaaatacaaaaataaattagccggtcatggtggcaggcgcttgtagtcttaactactcaggaggctgaggcaggagaatggcatgaacccgggaggtggagcttgcagtgagccgagattgcgccactgcactccagcctgggcgaccgagtgagactctgtctcaaaaaaaaaaaaaagtgtagaactttaatataacagaaaaagtatgtgcaaaacctctggcagagcccactctaacttataaagaactctgacatgtcaataagaaaaagccacattttgaagtagaaaactaaacgcatgcagggcaagtttactggggaaatggcccatcaacctgcaaaatgtactccccttgaaatccaagaaatccagatgaaaaggatgtattttcacctgtccttttggctaataatagtgtaatatgggctagtattgtcccacaagctttaaatttattatttaatttaatgaaacccttgtgggcaggtgttgtgttatatgtgttttatgaattaataaatcaaggctcagcgacgttaacttgcccagagtcacaccgcagtgagcgctgctgggtgaccagctcaggcagcaggaagctggtgcccacgtgcgtgccgtcgagagtgtgagtgggttcagcctcagggtcatttggtaacttaagtatatatgctccgaccttacctttttaatactcacatttatcttagtggaaaagaatcatgtacatgtgccgatgtacccattaggatattgatcacaatcttctttatcagagcagcattttggccaggcatgatggcccacgcctgtaatccctacacttcgggaggctgaagcgggagggttgcttgagccagaagttcaagacctgcatgggcaatgtagtgagacccccatctctataaaaaatacaaaaattaaccaggcatggtggtacatacctgcggtcctagctactcagggtttgaggtgggaggatcacttgagtccaggaggttgaggctgcagtgagccatgatctggcatctatactctagcttgggcaacagagcaagaccctatctcaaaaataaataaataaaaatggtaaaagtaggaacattttgatgataatttaaatatctatcactggggaagttgtttaaaagaattgtgtacatttgcataacggaagtactgtgccgcctttgggaataatatggtcagtacatacctactgatatgaacaatgttcacagtgcattgtttagtttaaaaaggagctgagaaatagaatcacatattatctagttcaagatcagtaagagaagtgtggacataaagaacaatgtctgagttcatatacctaaatgtcaccagtgggttagctttttaaatgcaattaaagcatgtttgttctagtattttctacattgagcatcttttatctgtgtaataaaggcataaagcgtgttttcttcacctgtctaaaagcatgaacttgtaaggaaaggagcaccagctctaggtaactgaagcagcagacagatctgaactgtggtcagaccgctccaaagctggcagctcatgcagcagcgtttcggggttgcacaccagtatggtttgcagtgataccattttcttcttgttcttccaggtgctgttaagccaagtgcaccggctgagagcattggacttgcttggaagatttttggacctgggtccctgggcagtgagcctggtgcgtgccttccgcattaacctgggggctgagggaggtgggacagagattaggctccgtgtttcagtctgtgcacgtatttcatgatccagagccacccccagccgtgagacccagggcgagtgtgtccaccgtgttggtgtcctgtcactcctgaggccctcaaggagcccactctgtacccgtgcagcctgcagtgctgcctggcgtttgggggtctggggttgtcgcccctctttatgtctgatgttagacataggagtgagtgtgttgtcggccggtcaccttttcctgagccgcccccagcgctgcggaggagcagggcgcccctgagcctgacgcagcacccacctcgtggtgctgcttcccccaggaggagtctggatcctcagcactgtctgctcaccatcatggcaggcacaattcggaaacgctcttctggttcctcattctatagcagagtagtaatggccactaaaaacaccctggcagaggcaggatcaagaagcgacgtgcgtttaacaaataactcacagggaaagtaaaaggaggctgagagggaaccacagagtcaaggaaactcgagagacctatggccagctgccatgtacagtaaaccttacttggttctgttgaagttccaaaaatgaatactcataaaacaattagaaattttacaggtgctggatttatgttattcaagaatcattgttcgtttttcttgggtgtggtaactggatcatgtttttataaaagagacctaattttttagagatagacactgaatattcaccaatgaaatcacatgacatatgagccttaatttactgtgcttgggagcggtgcggtggggcggtgggtgcggaaccgctgtcactagctgggtggtgagtacctgggtttggtgtatttaagtattttcatcagataatgttgacaaagagtggtaattgatagtccagcactgaaggacgagagaaaacatccaaaacttggaagaatcattcagcactcaccactgggccattttcactccaggtgcctgaggccacaaatagcttgtaacagagtcagggcctgagtcatcggaggaaggctggcgtgactcggtcacttggtgtgtgcgtggtggtgtcgcttagtcatcctggaaaggcctgcgtggtattgcgtgcactctaagaagacaggaagcatgtattcataacagtttagaaagagtttcatttttaaggttaattttttaaaaccagtttcttccctttaaagaattaagcttctgctcattggaaatttgcctaatacatgaatcgaggctggataaacgaggtatttttacaggtacagattttgcctctcaggtgagggcccagccacccgaaccagagaaactgctcataccttgttaaatgtggcctttcacagggaagggacccaggcctaggtcccaccaccacctcctgtcttggttacaggggacctcacttattggaaggtgatacctttaggatatctttgaaattccagcagctttgagataaggacacagcagaaacccctggctgtggagtgcagcagtactttgccaggcatcctccacactgcagtgccctccacgccctccctcccctgcctctgagggcagagagtcccctgagaatgacatggccagaactgggcgccagtgagcccctgggcaacccccgctcctccctgcctttcccagggcaggcatctttctcccaaggtgtatctgaagtgcaaacatgagtgttgagcaagctggccgtgccgtcacggagaggtggccgtggtgtcacggagaggtggccatgccgtcacggagaggtggccgtgccgtcacaggtggccgtggctcgtacgtgagcaacacagtgaaggtgcctgatgctctgctgccaagagcagacgaggccactgagggcaggcaagggccccaggcgcaagcagcctgcgcctccacaaggaaaagctgccacccgattcattccagtctcttgacaccagtcaaggctggcagtatgtggcagcttctaggaataaatcagagatgaataaatctggaggaagcccctctttactttaagtgaggcccattcattcctgttgcgtttcccatatgtgctgaagatagcaccgcagctggtcccgcgtggcacccctgctgctgcccgttcccttgctgcggcacaggtgcgctgacgccctccctcgcccccaggccttgtctgtcggcatcttcccctacgtgctgaagctgctccagagctcggcccgagagctgcggccacttctcgttttcatctgggccaagatcctcgcagtggacagcgtgagtatccccgccctcctccccagagtgatgtgaacctgccggcccttctggggatgccgagccctgcgtttccagcctgccctttctccagcctcgctccctctccaggcaccgccgttcccttcctctcttctggggtaaagtgggacgcgcccgcctcggcagccacctctgggtcgtgggggctgtcacctacctgtcctgtccctggccttcccctggtaccctgcgctcagtccccccacaccgtcctgtccctggccttcccctggtgccctgcactcagtccccctgcctgtgtctgacccccgtaaggctgtccccgtgctcctgaccctgactggaagcaaccccgccatggcataaacttggcctctgcctcgcccagaccccgcattggctctcctgtgcccaccattgcatttctccccctcctcaaccctgcacaggtggtctgggccaggccccgaggtgttaggggccacccccttacacggggctgtccagctctgtcctctctgacgggcatcagccctggccctgcagccatgtgttcgcccctcaatcatctaggccagggacccatatttagctatgttaagagagacacaaggtcagctgtccctgtccccagcggcttatgcttgggtgctggcaggggttgcaggtgacaccagccctgttgtgaggcagggtcacctcctgcaggagctaccagcgagatgggtcagaggagtggggctgagaagtcgtgtgggcgagacccggcctatgctgaactggaaacgccaggaagggccttgagggggtggatgtcgggcgggggtccaaacatggaggtggcagggagggctgggaagacatttagaggagggcaggccactccctgtggctgtgtgcggggacacgcagggaggccccatccacgcagacggtgcacggttcccggtagacacagttgaacttcatttagcaggcatggggattattacagattttggaacaaagacatcaaagaatgaagctgtggtttataaacattgcctggcctcggtgtcaagtggattgtagggaaacacggggtggagagcattttcctccaggagggtgggcagaggaggtcgggctgcagggctgggagggcggcaccaagcctgggttgggagaggcgactcgggctgaagcctgtgtggccggctggggctcggggagccttccagagacaactggtcaggagccctgtgcggcctaggagcagggctggcccgatgccaagactggggacctcgtctacccagtggtgatggcaggcgagaccctcgaaggaaaatgtggaaggctcagctgcgggagaactctcgaaagctcctcgtgtgacacagtggagaggagagctgtacagagtggtgcaaagggtctgggaagggctcatttatagaacgtgaagattctagaacaaagggtgtgtgctgagaatggagttgggggatatgttgccctctgcagggttgttggggacaaagatttcccagagatgcctttgcctttagctgtccgtgtgcggaggggcacacgtgtgtgatacagagctgggctcggagccaggttggcagggagccccgggaagaagccaagtcagtcttgctctgggggtgccgccacgggtgaggagagcgggacggaggagccggcatcagggcaaggctggctttgctccctgcttggttttgaagcaaaccagccccagcaactcattagaaggcctgtaggagcaggtccacgttccccccggacttcggccagctgctgtgtgcacgtgtgtgcgggggtggtcatgtatgtgggcgcttgtgcgtgcatgtgtgtgtggcgccctgtcaggcggctttcatatgcaaagtctcttaattcctaagtcccctgtgaagttagcttgaatttgcagcctatttactggtgaggcgccgcccacaggagggagcaggggccacatagctgccatgcgaggggccggcaccccactgggcccctgcgccgggtctggagctccttgcccacacagggaaatggaaggtctagcaaagtcacagagcaagtacaggagagtgccaagaacaccttggagaggccatggcttggagccggggaagaccaccctttccttttctgtgtggcaggtgaggggagagtggacggagcttaagcccccggggctcctgcctgctgcccggcgctccccaggccacattctgtcagctcctccgtccagtcactggcactgagacccagcctcatccttagccctgtcagccatgtcgcactggccaccaggacctgctgtgctcgctgaagctgccctgttgggctttgttcagccaaattcactgaccctgttgtccaggcactggcaggcaccccgagccacaggctcgtaccccgcactgtgcgctctcacccgtcagccctgcacaccccacacaaagccactgctgtgtctcccacccacagccgctgctgattcaagtccagcccaggccatcaggtccccaactgtgctgcccacggacccctgggcccctgctcagcccttctgctccctgcacccagccctgaccatagcctccccacaccccaagtcctcacgtactactttggtgtcacagctgaagtcagggggcagtggggaggctgctgccgaagcggacggtgagggcttccaccttggaggcaggcgtcagtcgtacccagcaccagttgacctctcgctggttccgctgattcttgtagattccctgggattttctgctagttcactggttcttgtagattccctaggattttatgtatatgctctctccaagcagaagcagcttccagcccctcttccggttctgggatctctcactctttttctgggcctggggcactgaccatggctctgctggcacgggtcggctaccgtgcttgccatctctcccagctgctcctgatttcctgagctggatgcggggagctgctgctcttcctctcagcacagctgaggttgaccttgacctcagttcaaccttgaaccctcctgggcccagtgctctgcacctggctgtgaccagagaacgctccataatggtgacctgaataccatatatttcagcaaaatattttccctgctacccattaaactacagataaagaatgactgctttgaaagattggctaaagcactggatttaaggttaaaaccctgagtttgatcccatcaccgcatttgctcttacaagtcattttcacttcccttggccatgatttgcctctgtaaaatcatgagccttcggccgtctgccttcagccacagttccagagctcagaaccaggacgtggaaaactgctgtgtaaattatagaggaacaggaacaggaccaggaaggggcaccacgtaaatctcacatctctcctgcctgtccctgttacactaaaaccttttcttgctaaacagaaagcttggctttgtggatcaggacgcgagaggtgtgggtcatttctattttactcttcttcaaattcactgaagagccacattatgtaaacaaagggtgtttggcaggaagtcattttgaaacgtggtttctgtcctacacccatatcttcgtcatctacatggacacacttagaaatatcttggcacctggccacggatgaaggaccatgtgtaggggctctgggatgcacaaaacggtgaccctcacatgacacaaagcccagggtgaagggaggaagagatgccatctgcatgcagaggtctgggattacggccgcctgagcctgctccccagcaccgccagtgctgcaggaacgtgtctaagccaactttgattctcagacttcgtgtttttagtaccttttaggacctggaaattgatgatgtctttatttttagtctcaggggtggctcttggtgaaaggggacagccttcctcgtaccttcctcgtgacattctcactgcatccacagcccatcatggtattgcagtgcagggcgtcttgtttaaaactggctcttggtcccgtggatctcccagggcctgttgctctcgagtgccccaaatggcagaacgtggccatgagcacggaggctgcagcgtgccttcgttttacaccctgctccaggcagataccagggcctcgggtttattattcatgctgctgaaggggtcatctgctcagtactgcttggggagctgttcccacagccagctgggcatgcccttgcctgcagtgttcttgtaactgcctgcaggcatcacaggccttcctgtgaattaatttcttaaccagcttgttgcacctgcatgtttaaaagcaatcattccactgaggggcattttgaagtgtttccggtagaaactgagcctcgtctacctcacctgcctcgcccttccttccatcgttaccctggcgataacttcccagagatgaaagttccctgtgtttttgaggggtcattcctctactcccttcccctccccacgtctggccatggatgttgctggcggtcctccggatctccacccctacccccccatgatgtgtgcaccccctacaatgtgtgcatgcccctctgtgttggtgatggtcctccgaagctccgcccaccatgatgtctgctccgccccctcgtgttgctggtggtcctctggagctccgcccaccatgatgtctgctccgccccctcctcgtgttgctggtggtcctccggggctccgcccaccatgatgtctgctccgccccctcctcgtgttgctggtggtcctccggggctccgcccccacatgatgagtgcctcctgcagccctcagccgtccctgtgactcctggggcttgccattgtgcagatcggggtgcacatggtgtacagacgggtccacctgtgaagatcgcagagcctgctcagaggttcagaggtgcagacagaagccagccactcccccagtgttctcagcatccccctgctgccgccagccggccctcaggacacacttaagagtttgagaaggatcggagcccactcaggctgggcccagcggaagggcgagcctgggacctcccctcatttcccaagcacctttggggcacaccgtgtgtcccattgtgccagaagctctgagggattcatggggaggccttaaagaaggtgggctcgggcggaagaaaagacggaagaacaccatgtgccaccggggagaagtgtgtgccgtttacatgagacagagcagggcacagtggtgacactgatctgacacagatggtaccgcacaggacaaggagcaccaaggggggcacatgaagaaagccgtctgtccaggattctcccaggactctgatcccagagggcctcccccagcatcactccccatgccaggttacactccacttcacactaccagccagaaattaccaggcagatagaatcaggaaaatatgacccgtaatgaagaaaaggaaatcaacccattaaaacctgctcagaactgctgcaggtgttatcattagcaggccaggacattaaaaagttagaagtctactctacatattcaaaaagttaaattgagacacggagaatataaaaagaacccaacttgaatttctagagatgaaaactgcaatatgtgatgggaagaaatatacttgatgggattaacaaccagttaagcattgcaggagaaaacagtacacggttaggcacggggctcacgtctgtaatctcagcacttttggaggctgaggcagacagatcacttgagtaaccaggatttcaataccagcctgagcaacatggtgaaacctcgactccacatgaaaaaatacaaaactcagccatgcatgttggcgcgtgcctgtagtcccagccattcagaaggctgaggcgggagaatcgcttgagcccgggaggtcgaggctgcaaagagccgtgattgtgccatggcactccagcctagggaacagagtgaggccctgcctcaaagaaagaaagaaaatagcaatagaaactaacaaaaatgaagcatggtaagaaaagaaaaaaaaatttaattaaaagaatattattccattgcgggacaacggcaagtgacataacgtactatttgggggtccataaaggaggctagcagaaaaagtatttgaagaaacaatagctaacatttttttgaatttgatgacaattataaacccacagatccacaaagcttagcaaaccccaagcacaagaaaactacacgaaggcatatcgcaatcaaattacttgaaaaacagtgagaaattcaaaagtctaaaggcagccagtaaaaagccagtaaggagcaaaggtgagaatgacggcaggtttcttcttacagatttcctacagatggaaaaggtgagagtgacggcaggtttcttcttacagatttcctacagatggaaaaggtgagaatgatggcaagtttcttctcacagatttcctacagatggaaaaggtgagcgtgatggcaggtttctcacagatttcctacagatggaaaaggcagacagcggaacagcatctttaaagcagagagagagacagagaaagagaaaaaactgtcaacctagaattctatacccactgaaaatatatttccaaatggaggcaaaataaagacttttaaagacatacaaaagatgaaagcttatccccggcagatccacactacaagaaacgtgaagtcctttagccttgaggagaatactcttcagagggaaacacggttctacacaaaggaattcaaagcagcagaaatgagtactatgtggataaatatgggatttttttctttttatttaaatcttctttaaaagataattgttttaagaaaaataataacagtgtactatgaatttttttcaataagccttttgcactcttaattttttttccttacgagacaaggtctcattctgttgcccaggcctgatcaccgctcactgtaagctcacactccctggctcaagccatcctcctgcctcagcctcccgagtagccgggatcacgggcacaagccacggcaccccacagaatgtataacatttgtaagagcaaaatgcatgctaacagtaacaaaaagatggggaggagagagaatgaagaaatactattgtaagattcttggactttgtttgaagtggtctcatatcacctgcctgaagatgaactgcagtagtccataaaccctaaagctgccactcaaattttaaaaagaattacagttaattagctgacaacagagatgatatgaagtcataaatatagacaacacggaaggaaaaagataaccaagagtagatgtaacaaatagaaaaaggcaggatgatagatggacacctaatcctgcccgtcactgcagtgtggagactgaacgccacaatgagaaggcagaggccaccaggttgaagagcaagaaaaaaccataccatggctacaagcaatgtacttttggcataaagacacgagtagattgaaggcaaaaggacgggaagagctctgccatgcaggcactaagcagaggaaggctgcagggcctatgttaatatcagacagaggaggtttgggagcagagaacgttgctaacaataaagatagacatttcataatgctacggaagtccattcatcattcatcaagagaacgtcgcagtcctaaatgtctattcacctaataatagagtttcaaaatacatccaacaaaactgatggaactgcgaggagaagtagataaatccgtaattacatttggaggtttcagtgctcctttctcagtaactgacggaacaagcagaagagaaatcagtaggaatagtggggacttgagcagcactctccagcagctgggccctgacgtttatagaacacgccacacagcagccatgcagtgcacagaggctgtgccacgataggcccgacccttggccaaataaacctcaacaaatgtaaagaactgaagccttacaggcgtgttctacagccacagtggagtcaaactcaaatcaataatagatagtaggaatgtctctaagcacttagaaacagaaacttttagataaataaatgattttcatttcattccataaaattttaagtaaattaatatatatgtgcttaatgcaaaatagaatataaatatgtaatattaagatacatagatattataagtcgtgaataacaaagatttatataaaatatttattactataagtatgtatatataatatataatataatgtacatataattataaatacttgcattaaataaatacattatataaacatgtatattaagatataaaataaataggttgagtatacgtggacccagctctgaacagtgctgagaggggagtgtgtagcagctgctagacaatgcattggaaaagagggacggtctccaaccggagatcccggcttccacctgaagagggcagcgtgagtggagtaaacccaaagctgtcggccaaaggaaatgatacaaatcagactggagactaatacgaaagaagacagtgaaacatcaaaatctgttgaacaaaacatttttttaaaaaacacatgaataaaactgtgaaacaccaccctgactgataaggaaacaaagaagacacaaattccagcatcaggaatgatagaggtgacatcatgaaagattctagggatattaaaaggatgataggcaaatatcatgagcaacttgatgggagaacatttgataactttgattccttgaatgacacataccactcactgaggaagacatcattaatctgaatagcactatgcttcttttttttttagagactgggtctcaccacattgcccaggctagttttgaacttctgggctccagcgatgcttccaccttggcctcccaaagtgctgggattaaagcctgagtcactgtgcctgtcactacaagtggaatttgtagtgaaaacttttactacaaagaaaactgcaggtccagatgacttcgccagtgaattttactgaacattaaggaagacgtatttggatgacatctaagcaccttcccatattgttctatgaggccagcattacctgataccaaaggttagacacacgttacaagaaaagaaaactacagataagtattctcttgaacacaggtacaaaaatgctaaatagaatttttgcaaattaaattcaatgctatttaaaaacaaaacatgatctagtgggatttatttcagggatgcaaacctgtttaaggattgaaaaatcaatggatgcctcttcagattattaaagaattatttttaaagagagaaaagtccatgtaatttaccatattaaaaaaagatgaaaaccatattaccatctcaagagatgcaggcaaagtattttaacaaaatctgagatccacttctgatttaaaaaaaaaaaactccctgcagactcctaatagaagggaacttcgtctacctgacaaacagcatctccacaaacttacagccaacaccatacagtggtgaaagactgaatgcaagatgaagccatctgttcttgtcacatcccttgacattgtactggaagttctaggtagtacagtgagtcaaggaaaaaaaggcattcaagttcaaaaggaagaggtttaactgtattttcagacagcatgattgtctatgtggagaatccagtttaatctattttaaagtgctactagaaaaaatttagtaagtttgcaggttataagatcaatatacaaaaatcaatttatgtatatacactagcaatcaacaattcgaagttgaaattaaaatagagaacatttacaataccactaaaaaaaaagaaatacttagggatacattctgacaaaaggtgggcaagatctgtacaccaaaactacaaaccattgtgaaaagaaatgaaggaagacctaaataaatgaagagatcgtccgttatcttgatttctgcttctgagatccacatggaaatacaaaggacctacagcaggcaaaacaactttgaaaaagaaaaacacagttgaaggactaatactacctgattacaagagtgactgtaaatccacagtactcaagatcggaaatagcttcaaatggacaaacagataatggaacaggaagaaagtcagggaatagacccatacatataaacacctgccctatgatgacatggagaaaatgaaaaggcaagacacagactgggaaaatattgacaaatcgtttttctgttaaaaacttgtggcaagagtatagaaagaactctcaaaaatcaatatgaaaacaaacacaagcagacaaagaaaattgggcaaaaggtttgagcagacacttcaccaaagaagtacaaatggcaaatcagcacatgaaacaatgctgaatatcattagtcaccagagaaatgcaaactgcacccacagtcttataccactgcacaccaagtagatgccagaaatgcaaactgcacccacagtcatataccactgcacaccaagtagatgcctaagaagctgctgttatcaagtgtcggcaaggccgtggaggaactggaaccctcgtatgctgctgagggcagtgcaaagtgtgcactaccactttgcaaacttatttcacagtttcttataaagattagcacacactcagcatacaatccagccattcctttcctaggtattccccaagagaaatggaagcatgtccacacaaaggcttgtacatgaatgttcctagcagctttatttataatggccaaaaactgggaatagcctaaatatacattaacaagcggatgaataagcaaactgcaatctttccatgcgatgaaatcgtactcaacaatgaaaaggcatgaactgatctcaaaatagttagattgagtgaaagaagccagtttaaagaagggtacctgctgtatggtgccattcatttaaaactctagaaaatgcaaactacagtcacagaaagaagatgagctgctgctgggggcaggtgagggtgggggcacaggggcagaagaaaatgtctgaggggccagaccccacctagactgtggcggtagcttcacaggtgtagacgtacgtccaaaatcttcaaattccgtacttcaaatttatatgtcgcttatacatcaatgaagcggctaaaaaacttctcattgtgggacagtctacaaagaactgtactgttcccttctagattttattttgtttttttattttttctgagatagagcctcactctgtcgcccaggctggagcgcagtggggcgatcttggttcactgcaacctccgcctcccgggttcaagcgattctcctgcctccgcctcccgagtagctaggactacagacgcctgccaccatgcctggctaatttttatgttttcagtggacgaggtttcccatgttggccaggctggtctcaatctcccgacctcaagtgatctgcgtgcctcagcctctaaagtgctgggattacaggcgtgagccactacacctggccccccttctagatttttaattcaagaaacacccccaaaaatgtggggggatttattctcaagactaatgtgtatcagctaagtgcagttcctagttggatcctggatcaaaaatcagaggctcacagaggacagttgtgaacaattgggaggaatttgactctggactgcgtgtcaggcagcaggattgggaggagtttgactccagactgcgtgtcaggagggaggactgtgtcgctgtcacgtgtctggagtgtgatcatggctttgtgctcatggaagcaaatgtccttttccttaggaatatttctgggcaaagcgtcatgctatctgcaactttcacacagtgcagaaaaacacaggggatcagggggcagaaagcaaacatggcagagtattttttgaaattgtccttagggtcatgtgatgggaccagagctcaagagcagcagaacttcatgatgagaaagtccaggagatgtggccacagctgtcttccgctggtcacactttgcaaggatggtggtagtggttgttttaataagttcctcaagcctgctgttagcatttgtgtatctgctaattagcaagattaaggagggggagagttaattaaggactcccgtaggcaaggttccagttaattgagggtttttcatagataaaattaatactcagtccagactgaccttctgagttatagttaataaagttgtggttatggtaccaccagggaactccaagagcgtaatgtcagtggatctggaaagatgctctgtgatggtattcatgaagtaaatccagatttggaaattcaaagaggcttcccactgggaacaggctgctgtggtccccggaaggaacccgcactatgaagaaaaggcagatgagagagtcatagaattttgtttctgcagcccccacgtctgtgctggttctcctacccgtgctcaaattctctactgttttctctgcaaagtcgtttcaccacagttcgtgtatgctggcgttgatagcctctcctcttcctgcttctccacttttccccactcccccttcctcacacacgtacacgcaaaactcaattcaaaaaatgtgcaaggttagctttctctgtcatccagcgatgactcagtctcaccaagggggcaagagagtgccatctagagcgtgtgaccctgctggtcccacagcagaaggcagtgccctggtgggggctagtctagttaggacctgagcaaacattttacttgtgtcccgaactcttgttcctatagtttctatcttaacaaattttatttttttagaacagttttagatttacagaaaactggaaaaggtagtaaatagagttctcatgtaccctacacccaattttccctgttgacatcttctattagtacaacatgtttgacacaacagtcaatgaacttatgttgatcagttattaactgcagttgatactctcatcagattttcttgctaatgtcctttttctgtcccaggatcccacatgacattgagtcctcgtgtcttcttgggcttctcttggccgtgacagtttcccagactctccttgtttttgatgaccttgacagctttcaggggtactggtcagggattttgtagactggccctctgttttgatttgcccaatttttttttcgtttgagacggagtctcactctgtcacccagtctggagtgcagtggcgcgatctcggctcactgcaacctctgcctcctgtgttcacgccattctcctgcctcagcctcccgagtagctgggattataggcgcccgccaccacgcccggctaatttttttgtattttgtttagtagagacgcagtttcaccatgttagtcaggatggtctcgatctcctgactgcgtgagccaccgctcccggccatgcccaatgtttttgtcctgattagattgggatttggagaggaagaccacagaggggagtgcccttctggtcccgtcataatgagggtgcatgctgttggaatggcagatccctggtggcgctggcctgggtccctggctgaggtggagcagacccggctgaggtcaggcgtcccccgggtgaagccgctgctgccgccccttccggaatgggctgctctttggaaggaagtcgcttggatgtgctaggcttttgttgcctaaactgctttatgtctgtggttaacttattccttcctgcagtttcattatctttttagggtctaaatatagttcttttaatttcctcttgttatttatataggcttactgtataaggcttagtcttggagttgttttattttattacattttgttttgcatttctgggattttttagtattccttctttcagtttgccccttcttgagctaaccttcctgcagtaccatcttccagctgactgtcagtggatgaggtggaaacagttttaccctttctgcagggagctttgccagttagggacccttcaggagtagtcaggaacgcgcctgtgcccacagttgggtgagtcccaggaacggcaaaaatgtcacctagcgttccccctgctcatctaacatagtttaattgccttgatggtccatggaatttccaaactagaggttgtgatatgcagaaaatcaacaagattgcattgctagggagcacgtttgtgaagctggcgtcttccacagaagctgtcatcagcgaggaggggctgttgaggggacacatttgtgaagccagcatctttcacagaagctgtcatcagcgaggaggtgccgttgaggggactccgggtgatgctttcgtcgtttggaaagtagcactgctgtgcagaatggcctctttttagccatcctcctagttccatgtggagccctcagaatgggttttactccgggcagattccaacacaccctcatgctatcccgggagaactgcggaccaggaaggcagaggccccttcctcccacccccatggaagccagaccacacgagctgggccacccagctgtcccagcactgggtcggtcctgggagaccacccaccccagaagagaccaggctaggtgacatgcacattggtgacaggccaggctgcagggaactgggtctgtcggtgccccctgggaaggtgggaggtgtttggctggagggagacagttgtatcagctgcctccgggttgccaagaatgaaatgaacaaaagagagaggaacccggagggggctgtctgcccagccatcccagttccaggctcttttcgcctgcacccaggcagactagaccgagccctggcaggggtgacggctcgccctttgcaagatggatgggcacaacggggccctggcaggtggaggtagcacggcaggctgtgccgagggcgaccacagaggctgtctctgtgtggcaacttcagggccccatgattgatggttaggctgcttggaacctgatcaaatctcagctcagcctgctgggtgtgagcaagggagaggggatggggagcctggtcagcctagagcgggccccccaccactgaggaggccccgggggggacccccagcctgacttctccctgctcatggctggctcctgtcccacactctttcgctactgtatttcctcttcttagtattagaatttggatgagaaaggcaccacagttttgacctgaggtcaaggctgggttcgttgcaggtccagaaggctgcagctcagacacctactctagccagaaatgcccggggctctgtgcggttccaagggctcctttgccagccctgccactgggcacagggagcccctccactactcaccgcagacagagcagctctccagtgggaagcaggtcctgggagtgattggcatacgtgatctggaattgtgatgtttctccacagcccaaacatgggttcttttattcattcatccaacatttactgagcgcctaataggaaccaggacgtgctgcctcctgggactaataaagactaataatgcatgtttttgtcctcacagagctgaaatctagcccggaaggtggagggtggaaatggctaactcaaatgcagcagcttgggaagtgcagtccaagtccctgcaaagggtggggagagaagcctttgcagaggctgttgcccggggacagggccccaggcggagaggacaaaggcccagcaggcagagggagctcaccacattcccaaagccgcaaaacaatgagctcggtgtgccccaaagtctgaggagctgaggagaaaggggaagatgagtttctttgtgcagagatgtttctcagtcaccactgtcacactgctgggttattgacaccagaatgtgaagaatctcactgtcagtgccacatgtgggagggcattgcttaccatgactcagcgtggcctcagggacagtgcgtcaggcccggcaggacagcactcggtctgtgctggggaagtcgtgcagacgtgcagagatacagacatgtggacccaagtcagccccggactgagcagcgggtaccccagaagggatgggcagtggaataaggattacatgtaggggcagaggacgtctcagtctgtacctgtctatagcattttaatgtttgagccttgatacctacaaattttaggacaggtttgaaaaagattgaaaaagatggaaagcatgccagtgattttgctatggacatcagatgcagcattcagggccactgtagacgtgggtatgtctggcctgagaataactaaagggctttttttttttttagacagtcttgctctgtcaccaggctggagtgcagtgacatgatctcagctcactgcaacctccacctcccgggttcaagcgattttcctgcctcagcctcccaagtaactgggaccacaggcgcgtgccaccacgcccagctaatttttgtgtttctagtagagatggggtttcaccgtgttagccaggatggtctccgtctcttaacctcatgatccacccgcctcggcctcccaaagtgctgggattagaattaaccatttacagaaaatcaatgtgtctatattaatatatatatttatgttgaaatatcttgcctcacttggcgagtggggaatacactgtgcctgggggtgaaggtctgaggcggaaagcttgtcttgcactgctcggtggatgttctgctgaagtcgtgaagagcagtgagctcttgtgaccggtaaacagaaatccctgcttcggtatcatttccccaggcattagcagttttattggcacccaccattgtgaaaacgctgcacatatcaacatctcagcacagccctccatctgcctgcagatgacttccccggtagcatcctcacgttacggtaacacaccaccgaaggctcactcaggagctgtgttcttgttggaaacttttttccttcccagcaccccgctcataacaagggctaaactcttctacccagtggacatgaaacacggcccgtatctctgtgattgtctctgtgttcacgtcagaacgcacgtggtagggtatttgcgtgaaatcgcgcgtggtagggtgttcgcgtgaaatggctcagggcttggctcatcatcctgcctccttatgccttccccgtcaggcacggtggtctgttagcctgggcgtaattcttgtgttcctgcttctccataaaataatccttaaaatctttgttaaggagaataaagggagggtctcttcccatggcatcttttgccagaatattcagaggaagaaagcccgccccggccttacgggtgcaccttgtagaaggcagggccttggccaggggctcctcctggtctctgccccattgtcgtgtctgcttgcaaaccacatctttagttgctgcaacaacaaatacatgcttgcatcttcccactttgtgtttgctcttcttctcttcttcacctcccttttccccatttaaaaaaatataagttcctgaaacctgagacacagaagaatcaaaattggcttcagtgtgtggtgagggaagggggcttgctcaggaaaaaaaatgtcatgttcatgctcttcccacctgctttctactctggccttcacatgtcaccaccatagcttgatctgggagaaaacaagcacagcaagatggagcctgttgagagggcggctttggcagattcacgctgccggcaccgtgctgttcatctgagccccgagtctctgccgggtcttccaccaagcccctccgcccaggatgtgtgtgtcgcctgccgggtcttccaccgagcccgtgccacgcagggtgtgtgtgtcgcctgccgggtcttcacaccgagcctgtgccacgcagggtgtgtgtgtcgcctgccgggtcttcccaccgagcccgtgccgcccaggatgtgtgtgtcacctgctgggtcttcacaccgagcccgtgccacgcagggtgtgtgtgtcacctgccaggtcttccaccgagcccgtgccgcccaggatgtgtgtgtcacctgctgggtcttcacaccgagcccatgccacgcagggtgtgtgtgtcacctgccaggtcttccaccgagcccgtgccgcccaggatgtgtgtgtcacctgctgggtcttcacaccgagcccgtgccacgcagggtgtgtgtgtcacctgccgggtcttccaccgagcccgtgctgcccaggatgtgtgtgtcacctgccgggtcttccaccgagcccgtgccacgcagggtgtgtgtgtcgcctgccgtgtcttcccaccgaacccgtgccacgcagggtgtgtgtgtcgcctgccgggtcttccaccgagcccgtgccacgcagggtgtgtgtgtcgcctgccgggtcttcacaccgagcccgtgccacgcagggtgtgtgtgtcgcctgccgggtcttccaccgagcccgtgccacgcagggtgtgtgtgtcgcctgccgtgtcttcccaccgagcccgtgccacgcagggtgtgtgtgtcgcctgccgtgtcttcccaccgagcccgtgccacgcagggtgtgtgtgtcgcctgccgtgtcttcccaccgagcccgtgccacgcagggtgtgtgtgtcgcctgccgtgtcttcccaccgagcctgtgccacgcagggtgtgtgtgtcgcctgccgggtcttccaccaagcccctccgcccaggatgtgtgtgtcgcctgctgggtcttcacaccgagcccgtgccacgcagggtgtgtgtgtcgcctgccgggtcttccaccaagcccctccacccaggatgtgtgtgtcgcctgccgggtcttccaccgagcccgtgccacgcagggtgtgtgtgtcgcctgccgggtcttccaccgagcccgtgccacacagggtgtgtgtgtcgcctgccgggtcttccaccgagcccgtgccacacagggtgtgtgtgtcgcctgctgggttttccaccgagcctgtgccatgcagggtgtgtgtgtcgcctgccgggtcttcccaccgagcccgtgccactcagggtgtgtgtgtcgcctgccgggtcttccaccgagcccgtgccatgcagggtgtgtgtgtcgcctgctgggtcttcccaccgagcccgtgccgcccaggatgtgtgtgtgtcgcctgctgggtcttcccactgagcccgtgccacgcagggagtgtgtgttgcctgctggctgccgttctgcgcgtgtgtggtttcaagtcttgtttcctcttctgtttaacgaggcccttggtctaagtgtgcttgtaatttgggcgagtgagcagcagccgagagagtccaccccagtccccctagccagcgaagtgggagctcccaggttcctgcctgcggggagggtgggggcggtttgagttagtgaaaatgtgtgtattaaacagatatgtaaatgacccctgccgagcgctgaaaatgaaggtatgaaaaggcatcatcatccgtggttcccacctggcataatgaccgtatcagaacagacatctggtagtatacaccacatagttgccagactccgataccaagggcacatctaagttctcccaccctgatttgcatgcctcaaattcagaattagtgagatttgagtcagtgatgcttcattacactctcgtgagacatgtttgaggagcttcaccgtgaatgtgtgggcttcgatttgacttgtggaacctgtggttaaaacaaaggaaggtgccttcattctcagaacccagtgctttttctgttgccctggccctctgggctgagtctttacgtggacggcggtcgatgcatctcagtttatttgtcaaaaccttcagctaaagccagttgttgcttgaaaactgcctgcttaattggcctcctcagctcgggggagcagcttgcaatctgaggccggcgcctggctccctgaccacccgctccccatcgtgctcagctctcattccagcagcccagcccataacccgcctcatcagtgtattgatgtgaggcagaaacacctcattgtaagagcacccctgagaaatggcggggttaggggcttctgggctgcataaccagcagattccctctgcaaaactgctcctgcctcagtgggaaagggccagctgtgcagggctgcactggagagccgttctcttcttgatcctcaggcatccagttcttaaaattccggccctctgtccttgcatggccttcgtcctctggaaaggagcatgctgggagctggcagaacgcacgcctcactctgtcgatgcagtgtctgtcactgctcagtttctaggtattgatcctagaaacccatgctctgtgggtccctctccaagaaacacagcatccatgatttgtacatcgcactgcagtttcagactgctttcacatgcgtggtttcatctctgactccacgacctgagcacagattttttttttttgagacgtagtcttgctctgtcgcccaggctggaatgcagtggtgcgatctcagctcactacagcctccgcctcccaggttccagcgattctcctgcctcagcctcccgagtagctgggactacaggcacgcaccaccacaccctgctaatttttgtattttttagtagagacaggatttcaccatattggccaggctggtctcgaactcctgaccttgtgacccgcctgtctcagcctcccaaagtgctgggattataggcatgagccaccacgcccagctgagcacagatttttaaaactttacctgggtccctgactagtaagagggagaacctggacttgaaacttagttttgtttcaaatcttgccccttttcctcgggttttgggcaaatacttcccgaagtattatcgttacccctgaatatccaaggcaggatcattttattcccttccagagccagcacttgcagaagtgtccccaagttaggcagcctggtgtggcttccggtaacactgccagcctcagagccggcctgtttcctccaggacgcccacaggaccctcggaagccccttcctctaggggcccgtccctcctccttccccaggccccgtcccccgccttgccctctgaaagtggtcttcagcaccacccgataagcggtgacttctcatcttagaagcctggcttgggtcaggttctgcgtttcggctgtgcgcgccccggagcagccctgcttgtgtctcatcatcgatgcctcagctgcagtgtgccccactgtaacccctccgggatgaaaacgcaacccacctcttcagtgggcagccctccacttggatcctcgcatccctggcatcatctccgtcctctgtccttgctgacccagctccaacccagcctgtctgacccgtagcccacctgccatgtccttcccggctgcagctcctgctgggctctgcagcccctcctgcccaacgccacctgcccccgcctgccctgctcctgcttgcccttcccctgcccctgcccccgcctgccctgcccccacctgccctgcccctttctcctcccactcccacatcccgggcctggacctgccatttcctagcagcaggagtcttttccctcgatcccacccttccccttcttccctcactgccctggacagttctgtctgctcatcagcgtaaagaggtctccaaaaagtacaagaccctccctctccccgctttccaagcaccctatggtgcctctcgctgctccttcaggaactgtgagcagggcacaaatacctagtgctcagcacccagtaggccctcacgactgtgccgagccatggccgtgtggctgtgattgtgctgacagcacacagtaggtcctcacgactgaggcgagtcatggccacgtgactgtgaatgtgtagacaggcacagaatggcctgaagcgtgggaaggtcgcctgcctggcagcagctttagcaccaggaaacctcccaccttggggctgcccctgagggtgaacaagtggggccagtgggaagcacctgctcaagtgggactgtgcacacaaatcactgggaattactgcctcacacacgattggttttcagcattttgtaagtccaagcaaacccccaagaaaagcttgagcgggaccgggtctgcaccaacaggctggttctgagtgagtgctggatggatgtgctccagtgtggagggcagagggagggagcgggacccctggagaggagcggggtgcaggcaggggctgcagggcactccccagcaggtgcccggacgttgtgaaagaaaacgtctgggagctgctttcctctgggcgttcgtgggatccctccccttcttagccaaggaaagcatgtctgcaggcaccggctgcagctgtttttcaaatgaaaactgggcttgaaaggaggaaataattgaggtataagaagtccctgcccttattcgttcacgcaccatgagaagcttgtggcatctgcgggacactgcactcactgcctctcctctgtctctttctgtccagtcgtgccaagcggacctcgtgaaggacaacggccacaagtacttcctgtcggtcctggcggacccctacatgccagtaaggacggggcagcacgctctccacgggcttgggactcagcactcgcctctgcccacacgctgcactgcggtggggccttttgacgggggctacaggagaaaggtcaagggtcacagcaggggccacgtccacggggtcagcaactgcttcacgttagacatggccctttgcttactaccatgagcgcagctgttatttcgtgtctgtctctaaacaagagctcagttaacccggacacatgggtggttttagtttattttagtctcttttcactgggacttctttgcaaaatagtcaaatccactctccctgctgtccgccgcgttagactagtgagcgccgcacgtctgtaatatgagagttcaggcgcctgggaaggtcttggagcacaagaagatatcgaagcaccccatttcaggaaggaagggagagaggaaaggaaggaaagaaggttgtttgaaagtttaaattttcagtatactttattgtattaaattgtttgaaaattagtaatccatgaatagggtgtatagttattctataaatgtttcataatgttttaatttctaactcccagcttagtaatgagaacaaaatagatatatcctaaataattctttaacataacttaatattgccagaatatttaaacatattagctagtttacacagtgttcggtggctttgctgtataaaggaacttttgtatgtaatttcaccccctagttggttttctaagctaaaggattttttaaaacacaaaacaaacaggactattttccaaaaggtaaacagtatgtgcactttgtgttgtattgaaacatcacaggcagttaaagttgatactttgtatcagttttggaaaccatcacttcccattcttaagaataaggaagaaagcaaatcccacatgaagaagtgaggaagaatgctcactggcgacttgggcgcgagggtgagctaagctcacatgaacggccccacctcagccacgagcctgcggaagttttgaggacacagccaggtttgaaagaatgaaaaggaggctgggtatggtggctcacacctgtaatcccagcgctttgggaggccaaggctgacagactgcttgagctcgggagttcgagaccagcctgggcgacatggtgaaaccccgtttctaccaaaaatacaaaaaaatttgtctggcgttgtggcacacgcctgtggtctcagctactcaggaggctgcagtgggaggatcgcctgagcccggggaagtcaaggctgcaatgagctgtgactgtacaactgcactccagcctgagcaacagagtgagaccccgtctccactcaataaataaataatataaatattcttaaatgactgactagaaagaatttgctatgattctgtcaaaccatcaaccattgttttgtttcttcagtgctttgtgcctgttatgagaaaacattcagtgcttcctactcatcctcagaaacgattgatttttctaaactcataagcagatctgaaaaaacaaattgaagctgtgaaaaagaaaagacatgcactgttattgaaaactctggagatgaattaaatcacagaacagacagccaagaagagaattcatgaaggagccacctggagcgccgtccatgaagctaagcgagaagatatgaaagccgggctaagagccgggctgggaacgttcaccatgtagccagcatggttcagaatgagaggagaataagtagagaagcagtttttgattagatagtggctgagaattttccagatttgaagaaaggagagttccgattttaaaagcaggatgaatcctgagaaggttaaagagaaacaaattcgtacatagacgcatcataatgaaaacagcaaatatcgaaggcataaagacaaaccttaaaagtccccagaacaaacgttattagcaaaggaggagacagcaccggccccaacagcagacctctcatcagcagcggctctcggccggggacaggggagccctcggcgtgcgaggaaagcgaccacggtcgggtcacctgcacccagctcagtcaccactcaggaatgggggtgtagtaagcagcgttcagacaccaacagtttactccttccgaaccccacagaccatggctagaaagaccacatgtcagcgaggaggaaacggaaccaggaggggaaagcaagatgcaggacacggcaaaaagccaagaagttggcacacgtgttggcacatctatagatttgtaaaaatgaagaatactcatggcgaattggagggttaaacaagaggaggactcaggtaccctgggagccctgcaataatccaaggagccctgcaataatccaagaggcgcgtaggacactagaccgcgcgacgtgtgtgtaaaaaactaaggcaccgctaaaaagttacaaatagactctggtttccaggtcagcggaggcacagaggaaaggacagaatgaaaatgagtcacagtagagcagaaaggagaaaccagtgaaacctagagcgctgcctccatgccttttgctgccaaagcccctgattgcaggaccgtgtgctcacagagtgctgggcaggctggggaggtgaggtccgggtgcttcataccgacagccacggctggcctgtgacagaggaggcatccaccaggtctgtgcccgtcttgcagtgttagggcttccaaggagcagtctgttcactccgggaggcgagcctggagctctaaggcctttgaaaacagctgttcttttttgtagagtccacgtaaaatccaggagtaaagctggctctcgttactttaattatgcgccacgcgtgtcatgaagattccgaaaggatcacgctgttgtactttgggaatgagagtttccactgaggggagacgaccaggactggtttttgttttccaggctgaacaccggaccatgacggctttcattctcgccgtgatcgtcaacagctatcacacggggcaggtgagccccccagccacccccagccccagagctcacccttggcattgcagaggagctgggcccactgtgaaacgtggtgccacatgggggacagggggtgtccagcagaggctctgacccttcatctagccagccatttgcaggctgaatatgaatcagaggaatctaaaatggggaaaattgagcaaatcaaggcttcccaagaatgggtggccaccgttgtcccgtgcaggtacccaccacgtgcctgccattggcaggcagaggccaacctgtctgtggtcccgcctctgcaggaagcctgccttcagggaaacctcattgccatctgcctggagcagctcaacgacccgcaccccttgctgcgccagtgggtggccatctgcctcggcaggatctggcagaacttcgactcggcgaggtggtgcggcgtgagggacagcgctcatgagaagctctacagcctcctctccgaccccattcccgaggtgagtcaggcgggggctcagagtccagtcctcctggctgccgactgcgggggtaaggcagaggtctgctcgcgtgcgggtgtggccggccacgtgtccaggaacttcaggggctgcacgctaataagagtaggacagtgggaccttggtgagaagagaaccacaccactggggattttgcacccaggcccagagtgcgctcccggggacagtggcacagctgcaagcgggggtcccagagggaacctcagaggcaggggtcacgtgctcgctgtccgggtgccgctctgcgtcctcactgtggcctgcaaggcagggaccactagatctccactttacgggcaaggagtcaggccagtggctcgtgcctggtgcagctgggaaaggtgcggggcactgcccacagagtggccgcgggctggaactctgggagtttcatgcaccattgccttcactcttcccaccggcctgtgcagtgcacagggtgttgctcatttttagagctgaggaagcagactcagggacagtgacttctccccaggaccacatggtgtcagaggcaagggctaagccagggtccccggaccccagggccagcacagtgtcgctcccctggctgagccctgtgtgctcagtgcacttcagggcccccatgcccctctgcgtccaggagtgcctgcgccctcccctctttccaccctcccacgctctgtggcccatcccagccccctcgtctaactcctgcctcgttcatcagcacattccctggtgcctggtttggtgtttcagttcccggggcaatgcagctcccgcctctgcagtctgagctgcccctggagctgggcggctgcccctgctgctccccacctccttccccgttgccactctgatagtgcgaggagagccttgggcctggagagctgttgagcaagcgcctgtggggttggattcacctgcacacacagccctggcagaaaggcaggctgcagcatggcccggtgtgggacatgcctgtgaccccccgccgccttgcaggtccgctgcgcagcggtcttcgcccttggcacgttcgtgggcaactctgcagagaggacggaccactccaccaccatcgaccacaacgtggccatgatgctggcccagctggtcagcgacgggagccccatggtccggaaggtgcgtgaacccccagcccggcagcagcagggcacccaggctggaccccgtgacacctggggccaagcccgcatggccctgaccacagcagggagcactcagtttccactgcgtgtcattgcgagagcagatctttacatgtttcattctcttcaagttgcgtttctttaccagacacccatgggtttgcttcatttaaaggcatctagcaggctgcgcctcccggcagcttgtgtagtagtctccttcctgcctgggagcaacacacacaggcaccactgcgattccaaagagacgcagccacccacagatggcgggaaggtttgtgtgctgggtcccccccaacaccccatgtacgtcagcgactgaacaaaacagttttatgttttgttttgttttgtttttgtttttttgagatggagtctctctctgttgcccaggctggagtgcagtggcgtgatcttggctcactgcaagctccgcctcccgggttcatgccatctcctcctcagcctcccgagtaactgggactacaggtgcccgccaccacactcggctaattttttgtatttttagtagagatggggtttcactgtgttagccaggatggtctcgatctcctgacatcgtgatccacccacctcagtctcccaaagtgctgagattacaggcgtgagccaccgcgcccggccaaaacagttttataaacttgaaaacttacttacctgtttagatgtagaaatatcacagatgatcgtccaaggtttcacaccctcagattccccacccaccccagcgcaaaaggggcgtttaggaagacactggtttcctgatctcctttgctggtgagatggaaggctgctcttgcagagaactcatctgacagctggagcacagagctgctctatgggcagggagtgtgtctccccgtcaggtggcgttggccaccctcgtgcgttcccgtgctggctgtgtgtggctccctcttggagatgggctttatcatgagacgggccgtggtccaggggcctgggggttgtttgtctggagagcagctgccgctgctttacttgggagggacgtgacccggacaggtttccctcagccagacgaagtgtggaaagtcacgttctatcgtgtgtacccttctagaattagcccaagtcatgagtatgctacattttctaacgaaatcttgaaaataggaagtgaggttccgggctgccttttctgttggttctgactttgttgccatcacgttctcctcgtggccgggtttctgaacctggcttcttttggcccctgctgaattctttttcccacatcaactcacgtttggtggacatcactgatcaaagcagcaaatcagcggtttgtctgctaaaattctttttaaagtaaggaaagctttgtttcttctttacaaaaacgatatgaaaatagagaggacgttagctgtgaggcgttccccaagagccatcccgtggccgggctgtggccctgtggtgtggccctggctgctgaggcactgagacgaagctccccctccaccgggagcggtccggcgtcactcgcctgcacggctgcctgctgaacctgcatcctggagatgtggcccgcgaggacaccgtggggttcggaggaggtgctgccaaccgggacgcagctgtctcggggatgctgggcagggcgtgtagagggggatgacagcccctgccctccgggagcacgtggtctaatcaaagaggcagatacagataaggtcattacaccagagccttgtggagaaatactgcctggagtgctgtggagctcctgagggctgtgcctgtgcctgcatcggagcgggaagggtgtcagcagaggcttttgtggaggggcagctcttacctggttatggagggtgagcaggagaagcagccaacagagctgataacgccagctggcagggtgatgtctggagggaggaaggctagcgaggagtcagagaaagacaccgtcactcacctgtgaccaagcgggctgcactggcgcgcagactccggaggtgcgctggctctgaggggctgtgctgactctggggggtgccagctcggggggtgcgctggctctgagggggtgtgctgactctgaggggtgccacctcggggggtgcgctggctctgagggggtgtgctgactctggggggtgccagctcggggggtgtaccgactccgggggtgtgctgactcttggggggggtgctgactccaggggtgcgcctccatcctcgtcatagagtcctgccgcatcacagctggttttctcttctgtttactaaccaccatgggcaggcacggtgctctgcaggggacttgggcacaggtgcaagcaccaaggagcctggcggcgtggagccggccccattctcgcagcctcttctcaaggaccatcctgagcccgtcctgagcctgctgtggggctggggttggggagtagaactggctgagaggctcctggcaccctctggggtgggagagaggagggtgttactgctgcttttccataaaagcaacgtgtactggttaccaaaaaggttacatccatcctactttttaataataaaagtgtcctctcctgtgtggggtgataacgatggccgagtaggttttgtttgttgacttgtttaatgagcttacttgacaaaatttaaaagtcagcaaattcagcttagcccccaaattattttgaacttcaacctgtctttgaagtacaaaacctgcagtcagcagccacccgtcccttgtcaagaagggccaggccaggggtgcggggctagaacccccagtgtcaccccagcctctgcctgggccgggctgggcaggagccgcacacagggacgggctcagcggggcttggatgggggcttactccctccctgtcatggcctcgggaggaaataaggactgttcagatactattttattttatttgttttattttattttgaaacagagtctctgtcacccagattggaatacagtggcacaatctcggctcactgcaacctctgcctcccgggctcaagcgatcctcccacctcagcctcctgagtagctgggaccacaggcgcgtgccaccatgctgggctaatttttgtattttttgtagagatggggtctcgctgtgttgccccaggctggcctcaaattcctgggctcaagtgatccactctgtaatcccaggccttggtctcccaagatgcttcccaggacgctgctcgggcctgctgtggtcacaggagctgagttttatgatgcctgagcacaggtcacaagacaaatattagccagtgctgtgttgttggagcggagtgggtggccctcagggcaggtgggcaaggggtagaggcgaggtgggccagtagcccatggtcagtgcagccgtgtcaacactgggaagtgtgtgggcccccagcggggcaggacatgtgtccaagaaagatgtccttgagtcctggcaccagttcacggttagaaactaaccatgtgctacagacgacacccctgcagggagggctgcacccacccagaacacacttgtcaggcacgtgccacgtgccgggccggctggggcctcagtgaccccgcagggcactaaccctgcctcttctctcaagaaagttacccctggagctgggggaggggctgggtgtgagagtggtgggccggggtggcagctgagcagagccagtatggatggggctgggggcacagggaggccttgccacagggagaggcccagtgcaggggctgtgcccatcagagggcgtgggcacaagaggccaggagggcagtggggcaggtggcccagccaggcacaagccttgtcgttcgtgatcagaggcctggaggggtttgggggcaggacctcaccttcggctgcccaggtgagaggggccgctcgcccagctgcagggacggcgcaggagggaagaggcaccagcactttgaatgcggagctcacagcacttgctcacaggtggagagggtacgagaaaagaagaggacagggaatcctgggggtttgggtctgagcaacagaagagcagagttgcccctcgttgaaggggccagccatgaaggagcaggttccaggatcacgcatggactctgaaggtggggagccgacaggaagggctgagctgacaggtgaaagtatgagtccaggcaaagctgcctccctttcgaggaaggctgctcagccccagccagggagcaggaggacagacaatggctttgacaagcgaccggtcagaggacctgggaagcctggccagtgtggagcccgtggccactaatgtggcctccccgtctgtgtgctgctggggagccctcagggggaaggggtcacatgacaacaccagccaagctcatcttgcaaaagctgagagagaggggagctcccacacccctggctgagcacctctgccagaccctctgatgggttctgcatgaatatcctaaagaaggccagtgcgtgtgtgtgttgctgtcagagcccagctccattcaggaagggcaggaagggtccaacgcaaaggagagctctttgctgtgtgccaggcagcagcctccagagcgaggcccgccatctccagcaggatgtgcggcctccaagggaggcccccgtacgcagcaggatgtgcggcctccgagggaggcccccgtatgcagcaggatgtgcggcctccgagggaggcccccgtacgcagcaggatgtgcggcctccgagggaggcccccgtacgcagcaggatgtgcggcctccgagggaggcccccgtacacagcaggatgtgcggcctccgagggaggcccccgtacgcagcaggatgtgtgttcgggagtgagggaggcccctgtatgcagcaggatgtgtgttcaggagtgagggatgtgcggcccccgagggaggccccgtgcgcagcaggatgtgtgttcgggagtgagtgctctctggacattccccttgaataacagacgtggcccctgttggcctcccctgaatcgaagggcccaccacctcggtgcacgttaatccatgccagctcccagctctggcttttctcacctgatgtcagaaggaaagggaaaaaaatcggtgctttctgaagacaggtgcagccttgatcttccctggaaggggcccagtgggtgttcgctttgtcggaggccccgtctcggcagtgcctcactcctcttgcacagggaaggcagcgggggttctgtggtttgccaggggagcctgggacagtgacttaggcagttggagacgagcgccagaaccggggcgtgggccatggccgtgaagacgcacactgggccatggcccttggtgcccagcagggtgggaggggcgggtggagggtgatgccagggctccattctgagcagtgagagacttgcagttccatcggcgcaaatcaagagggcgctgcaggctgaagggaaagtagacggtgcccgcagttcatagggcagggagagtttggggtgcaggtgaagagccggcagctggacagccagcctggacctaggagagtgaggggccggcatcagggaaaccacaaagcatgataggaggaagcccggggcatgtaaggctggggtgggaaagtgcgtgtacagagagtgcgtagacggagagtggggtggccacgagaagaccctggtccctggtgggcgcccatccagagcctgctcatccagccgctgtggagacaggggcgtcacgcgactagcaaggggtcctctcacagcgcttggctttctgctaagaatccgtattttttcttttcagaaaaaaaaaaggcagaaaaagttgtcgtagggaaaaaaacgttctttccgctttttaaacctacatcccccttctgttccccagtgacttctaggatctccagctgttcctgtcacagcactgaactgtcctaaaagagaggcaaattgtgtctgttcccttggaccaaggcatttggtcctaaagatgatgttttagttctacaacttttcccgttccctcttagggactagaaacatctaccaatgaaagtttcacatgtgttgaaaagagcaggcttcggcttgtccgctgcactcggccctggggcgctcagattcagaaaggccgccagccatcgggtgtgatctagagcggcgttttcagccagggtcccagtggtcaccgtaagcgagaggctgtgaggcctcctacctttccctctctggagtcctgtgactcaccgtgtccttacgagacccccgatgcgtcgtgcgcctctagcagtggggaggattctggcaggcattctgggcttcccccgtgagccagtggcctgccgtctcccagcactctgctattccaaggcctctgctctgacggttcgaaaagggatggtccctgtttctgatgccaattgcacggttttgtcttaacctttcttttttctgttggtgactcaagtctcactgctgctccacaatcattttccagccccagtgactgttattgtcccttctccctctcggcaggagctggtggtggctctgagtcatcttgtggttcagtatgaaagcaatttctgcaccgtggccctgcagttcatagaagaggaaaagaactacgccttgccttctccagcaaccacaggtatggcgtcttctcctgtgaacccgcagagcacctcgcctggcggttctagtgcaggccgcggcccagtcttgctcaccctcgcagagtctaagcgcaggtttctcagatacctgccgcaaggggtccctgtttttctcatctttttaggcacctgccagatttaaaagggcaggaaagagggccacactgaccctcttacatttttcctttctttttaccctttttggaaattaaactcacagagaccttgaagtatgacaaaacttctgcagtaggagcttgcggaaaagcgcaggggccgtcttcctgcgatgagtaatttcatcacactgctcttggctccgtggctcggtgagtcatgtcaggcgtgctttctcacacgtgtcgttttgactggagagtacagttcctatctcatcgctgccggcagcccctcccgcttccacacagccgtctctgccgtgcaggggcttgtcatcagcagtgaggcctcactgcttctaggaagcccaggaggggagaagggtgagccagactgagtgtggacggtcattgctctgctgcggcttcccggggagcacggctcacggcccacgtcaccatgcacctcgtgtgcactcggacaggccgcagccaccagcctctcccctgttgtcttttgtaatttaatatgcacagagccacaagcggttgttgtttgtccagtgctatcccgcagagcctccgctcacgtctgagtctccctgagctgtgcagcccctgctctgacatttgttgcagcacaggtagcagctgccgtcaccgagtgtcccagctgctgagtgtcagaagacacgctggcctccacctggaagcccattgtaatttgtctttctccttctttcccagagggagggagtttgaccccagtgcgagacagcccgtgcacccccagacttcgttctgtgagctcctatggaaacatccgtgctgtcgccacagccaggagcctcaacaaatctttgcagaacctgagtttgacagaggaatgtaagatcctggaaatcgggttattggattgggagagattggggttgttttttctgaaacactgtatctgagtaagcaccactctgcccctgccccttcgtctaagtgcgtgccctgaagtcccatctgccaacatggtgatgagtcacccttccagacgtgagcatggcaaggaggcgtaggccagcccccagaatagccagcgggcccgttaccaatgcggcagggagctcaagcgcagccgcagttgaggcggtggctccttggagggctgtgccctgcccccgtctcccagtaacctgtggtctgcgggtggggagcttggctcccagggagatcagtgagtgcctgtgcctgtgtgtgcgccggggcgtgtgtgccagggtgtgtgcgccagggtgcgtgtgtaccagggtgtgtgtgcgccgggtgtgtgtgtgcgccaggtgtgtgcgcgcgccaggtgtgtgtgcgccagggtgtgtgtgtgctgggtgtgtgtgcacaagggtgtgtgcatgccagggtgtgtgtgtgtgtgtacaagggtgtgtgtgtgccagggtgtgtgtactgggtgtgtatacgcgccaggttgtgtctgtacgcgccagggtgtgtgcgccagggtgtgtgtgtatgagggtgtgtgtatgtcgggtgtgtgtacatgccagggtgtgtgcgcaccagggtgtgtgtgtaccagggtgtgtttgtgcctgggtgtgctgagctttatttagaagaaaatatgtatctcagtcatgccattaactgtaagaccaaaaggagggtcccgggagcaccccactgaccccgttgcgtctcgggcagctggtggcgcggtggcgttctcccccggaaacctcagcaccagcagcagcgccagcagcaccctgggcagccccgagaatgaggagcatatcctgtccttcgagaccatcgacaagatgcgccgcgccagctcctactcctccctcaactccctcatcggtgagtccgcctgcccctttctgcttccgaggggccccgagggtctcctccccacacagagcagcacagacctgtgtctgcatcaggtcagtgggtgtcaaaactgtctgttcaaaagaaagaataaaggtcaacaggactgcgaggcagggagaacgttttgctggggcaagcgggaaagttgacatcactgttgtgttggggtagtattttacaggctgctccggagccatcggagctggccagtttggctgggtgggaaggctgccagaaccttccatctttgttccatagacgggtgagagttcttcatggtgctggacaccctggtgatgcagaacggtggttctcagccgggggtggttttgccccccacgagcaactggggtacagtaggggtgctccttgtcccagtgggtgaggccaggaagctgctcacatcccctggtgcccaggacagcccccacacagtgtccgcagtgagaggcggagggccctgcggtcgggctgggggctgtcatccccgccctgctcacctgcggaatctccacacaactttccctccatcccagcagcttgacgcagcactgcctggaaatggaaatctgacggaagggtcagattcttctcttgttctgccatgaatggtgtgtgcctgggtcctaccaccaggattgctgttgtaaaacaggagaagcaggaattcaccgtgttttcttattgtgtagctatgttcatcttcacactgctggtaacagatttagggcttaaccaaatgagcctcatctcctcttgttctgactatccagagtggcttaccggcttcatttgaatttttttcatgttaaggagcattttagccatgtaaaaatttacagagacttatataagagcgctgcgtgtgtgtgtgtgtgtgttgtgttcccagcttaaggaattacagaggtcgagccccagaccctaccccggtcccattccctctggtgacattacactttccctccctggccatgagccctggcacacacgtggtgcccacttagaggcctttacctcctattggcgccgtcgcacgatgcgtggcccgcaaagcccgtttctttggctctgacttcaatatgtatctttgatggtcatctaggttttgttccttcacctccgcgatctgccgtgactccattatccattctcctgtctggggacagtgaggccggttctagtttcttcttgccttttgttccttttcttaataagcaaactcagaattcagcccctgccaccatggagccccacatccaacacaccctcactcgctgcacccagctctgctgggccccagcctacccggcccccagcctgggcatcggtggggaagctcttctccggcatatggtggccgctcccctctcattcagagcccccatctggcagcaccttcccagaagcctccccagccccacgccccacctggaatcaggcttccccagctgccctctgaccctgctcccttttcctgctttatttttctcctgaggactgtggactgcagacgtgctgtacgtgtaacttgttcattggcccggcccatctctctcccctggagcttgagagccgcacgtgcaggaacccagccttgttaaccactgtctcctcccaccctgtccacacccagtgcctggtacgcagtaggtgctcaatacacataaacgggcacgtgtgtggtgcgtgttcttcagcgtggatacacgtgagtgcctctcgccaccttgcctcagagtgaagctgctgcgtgaacggtgcctgcaccttcagcttttgtagatgtcgccccaggccttccacgggatcctctgttctaaagcgcaggcgcccccatctcgccactctctaccacgccggtcttggccagcctttgtctgtctgatagacacacctggtgtctccttgtggcatgaatttgcatctgccttgattgcagtgaggttacagccttgcagccttacagactcgccttgtgtcgtttatctttctctgagtagtttgtaatcagcattcatcacagttctgggtgctgattcctggctgaatatatccatcgaaaatgcatctaatctatgactttttatgatgcctttggtgccacacaagcttaatcttttagtttctctttttctttataacttgggccttttgtgtcttgtttttcctattctcaatgtcctaaacatattctcctacattttcttccaagatttaaaattttccttttttgtgttcatgtcttaagtatatcctgaaccacattttgtctctgtggtgaggtggggatccaggttgtattttttctttatgccaccccagacccttcatcagacagcccgtcctcccgccagtgcttctcagcgtctccctggccatcagtccttagggtctgagtgggggctccattcttagcagcacccatcccatccacggccgcgccgacaccccacacagccgccccgacaccccacgcggcctcgctgacaccccacggccgcagcaacaccccacacggcctcgccaacaccccacggccatgccgacaccccacacggccgcaccgacacatcccacggccgcaccgacacaccccacggccgcaccgacaccccgcatagccaccccggcaccccacggccgcgccgacaccccacacagccgcgccgacaccccacacggccgcgccgtcacaccacagctgcgggggcagcacctttgagcccgctcctcagttcgtttctcagaactgtcttggccgctcttagccctttgctctgctgtatacatttcacagtcaggctttctgtgtcgacagcagcctcactggggtgttgtttgaatggcgctgaattggtggatttccctgggatgactgacttccttgcatcatgagtcttcctgctcctgaacagggtgtatctttccatttacttaagtcttctttatgtcttcaagacagtctaactttctgcataaaggtcacaggcatgacgttacctttcagtttttgtaattttaagtaatatcttttttaaaacctgttgctggcaaaaaaagaaagaatgccagtgggctgggcacggtccctcacgcctgtaatcccagcactttgggaggcggaggccgagacgggcggatcacgaggtcaggagatcaagaccatcccggccaacatggtgaaaccctgtctctactataaaaaaattagccaggtgtggtggtgcgcacctgtagtcccagctactggaggagaatcacttgaaccggggaggcggaggttgcagtgagcggagatcacaccactgcactccagcctggcaacagagcaagactccatctcaaaaaaaaaaaaaagaatggcagtggacatctgtgtttctctcttgagagtaaacgaaacctttctaaccttttacctttgatacgacatttgctgtagattttttgagtgggtgctctatatcagtttatagaaattcccttccctttggttcactctttttatgagtgcaaattcccattctattctagttagttaagaattttcctgataaatggaattaatttctttgaatgtattttctgcatctcagaatgaccctgtgcatggctgtttgttagggtagggaattacatgattgaatttcttgtgaaatatccttgcatttctgggggcacccagcgtggtaatgtcccctgacatcgctgccttacgctcaccagctatttctttgggcgctccccattggcattcacgagtgggttgggctgtgacttttcttgtcctgacctggctggtttagacattgagtctgtacctgcctagtaaaactggctcctccgggcatggtgacaggtgcctgtaatcccagctacttgggaggctgaggcaggagagttgcttgaattcgggcagcagaggttgcagtgagccaagatcacgccactgcactccagcctgggtaatagagtgagactccatctcaaaacaaaaacaaaacaaaacaaaacaaaactggctcaggagtgtaccctcattccctgtccaaaaaaactggctcaggagtgcgccgtcattccctgtcctcgggggcaatttttataagacaaagatgatgtgttctttcggtgtctgagtagaatttgcccctgaactgtctgggctagtgtagtgttgtgagggtgggtttgaattctgtattccatttctttaatgctgataggattatttacattctctatttcttcataagctagcttcaaaaagttttattcttctaggattttattcatttcagctaagtattctcattctttcccttgaggctgtctgcagtattctcatgagtctctaatctctgctgtctctttattgttttagctgcttttactgatattcccaatctgctgcctctttagatatgtccccgtttattcctattgttgtttatttgccttttcccctttttcctgattaatcctctaagatgtttgttcatttctttagtgtcttcaagttctaacttttaggctttgtggatttactgcattattttatctttatttttctattccagtactttattttgtttcctttctactgttttctctaggttcactctcttgtcctgttacagttctcaaacagaaaataaaaacagctcattaactttgagtttttcttccttcctaatgtgtgtgttcaggtctgcgggacccctgccccggctcccccaacccctgcccccgctccccccccgctccccccaccccccgccgccccgactccccccgccccggctccccccgcacctgctcacccaacccctgctcaccccgcccctgctcaccccgccgtctccgtctagtgagttttgatgatgggcttttcacttgtgttcagcttcaagctttctttctacttccattgtggttcctggggatggcggtccagccacaatgacagcagcgcatgacaggagcccaaagacccgaaacagacgcagggcatccgccaaggcagttcccaccgggcaaccctgtgggtgtgctcccagccttggccagctgctgccttgagcacctctggatagaacgagtccagagcttgcaccatgccctccagggtatggagaactgaaaggttcactacacaacaacccagacacgccagcttagcccagacacgccaacttgttaattttcattgagaaataacgttgcagctttgtgcatttggctgtccactaaaatatgccaagtgcccagaaagcgcagagttgactccgtatattcgagtataaatcaaggtattgccaagtcaccaatgaaatatattctaacgtcacttgtaagatgtttgttttgaactggaatacactttttaaatagaattaatgttacatatagtggttaggtttccaggctagcctgcaagagtcttttaaaacctgtctgcagaaattctacttataaatctacaatgaaaaaaggtatttaaaaatttttttttaagtactagaaaatgtaaattcatagtattctgttttgattacacatttcccctggccccggccacagctcctgtgaatagctctctagcgcctccagcaggttagtgccacctctgccccagttcacgctcatcaaggtcaaggtgatagctcccttccgtcacgtgtaggttagagcaggagtctgcaaactcttcctgtgaaagagctttgcaggtgggactgccccttggcacttccccaacactgccagtgtggtgcaaaagtagccagagaccgcgtgtaggtgaatgaacttggccatgttgctatgtaaccgtgtggactgaagtttgaattttgcgtaacttcacatcacaaaatattgttcctttgatttttttttcaaccacttaaaaagtataagaaccatacacaggccatagaaaaacaaggctgagttcagctcagagagcctgacagtagggcacaccctgcccgcaccctggcctccaaggatactcctgtgagtcagagggcttgggattctcccacggattggacagatattttgacagtgcccccactgtgcatgctggggcacaaaagtacagaacaggcaaacccaatgccacctgtgtcgaagccagtaccatcggctctgggcatctcccacccctccctgcagaagtgggcgtcctccctctgcagccaaggggaccggcgtttactcaggttgactcctggccaggagtcggggactcctctttgtgccccaacacatccttctctcagccgggcatctgtggccgtctcctccccgcctcgcagccacctgagccagcagctctggcctggtggtcgcagctctctcccgggtctccctgcttccactgtggccctcctggggccgtgtgctcactgtggccttccttttttttctgagatggagttttcctcttgtcactccagctagggtttaatggcgcgatctctgctcactgcctcccgggttcaagcaattctcctgcctcagcctcccaagtagctgggattacaggcgcatgccaccacacctggctaattttgtacttttagtagagacaaagtttctccaagttggtcaggctggtctcgaacttccaacctcgggtgatctgcgcgcctcagcctcccaaagtgctgggattacaggcatgagccactgtgctcgactggccttcttctttcacaggaagcgacagcagcatcacccctcggtgctcacctggtgaccgtctgccaagggcctggtggccccgccaccctacctggcccatgctccatggggttctcggttcactctcgtccctccactcacacgtatctggccatcaagtaagaatcaaaataaaaagttgcacctggcctgcaagtgtgcagaaccgcaccttttgttgatccaggaagctcaagccaggcagtgtggcgctgggtcaccatggcaccattgagagcttccgtctgcaggtccccacgcccacagcacctccctttccccctgggcatttggataccacatgggcatctccccttctgctggcgaaggctacagaaagttcacagctgtggagtttccaggtggctgaacttgctgaggctgctgtttgctgtgcgcgtgccatgcctgaggccctgggtgctgtccacaggcaagagggactgcggaggccccgcccaactcctgtgtgaaacttagctcttgtctgtgatgagtgaatgccgttgttatcctcggtactggtctcggtggagtacagggcgaagaatcgcagtttcatttgagggccacccagacgggaagcacacagcagcctggggcccggacacaggggcttggcctccatgagttttctcctctgccggttctttcttttctgtcttctcgaaggagctggactccccattccaccatccttcttatacaatgtgattcctgacttttttttttttactggagaaaactgagttttattcgtatatcattcaaatcttaggaaatttgacaggaaagagtttcacaatgagctggagtttaggaaggaaagaaaacaaagtcgcccctgcaaagccagcctcattcatattcagtgaggtgtcactcacaccacctggaaaccaccgtgcttacctaagtgtttagaagtcataacttacacagaatcccattgtgcacagcacttccctgtttccagccaatttcttctttcatttcagccaaagaacagcaatctctttagtcctttcagtgaagattgcagaggctttcagaaccatggcaacctggagagtccatgtctccccatctttcctggtgccccagaagccctgccccagcgcctccccatctttcctggccccccagaagccccgcccccagcgccctccctgctctgccttccccagagcacttgcattcttacaccctcagtcacgtgtttcctttcttccccgtggcaatgaagccccttggctggtacttggcttcctttgatcgctgatggagcccaggttcccccagcagtgcctggccctggtggggcaggataaatgtttgtgaaactaaatgggaacccaggtctcagcactgtgtcaggttctagaatcttctttgatgtctccatcctgcttgtttctcactcagcccttcgtctggcctgacatccacaagaatcccctacctcaatccctcctatttccagtgcccccatcccaccaggcctcgttgccctgggtcttgctctctgcagaccacaactgggcaggccctctttcacaccagctcctcaccaccctccaggtgaagccttcgttaaaaccgcattttctgtagaggccaaaccattgtctgacattcaaggccttccttcagcctcctgccccccgtctcagcagcagccgctccactgcacctgcccgcagcacccctggctggcccctggcccggcccctctgccatccgtgcagctcagagccaggtggtcttgccgggaggttgcctggcccaccgccaggatccccatgtaggtgcctgacccagtacatcaaagcatgatgtcgccatttttaccaccacagtcctataaagttgtttcttgctaacgcatggatgtgtggacacaggcctcacctgtcccggcccccagcccatgcgtctgccctctgcacttatctgtgttcctgacggccacaagtggccgtggagctgctcaggatggaaggatggctggagacggtctgtggcctgtgtccacatgtcccgggacccagcctgaggtgccctcctcacccccagacacccatgcatgtggccccacaccatgtcactcccacgctcatccgtccagccccagctcccagctagagtgcagtcccatgggggaccacgctgctgtgtgctccacccgccttccctcccgaaaccctgcgtctcggccagagtccaagcacacccgtgctgagaggcgaggcgggagttaattctgctcgggactctggtggcctgagaaggctcttcccgcagaaacagcctcatcccgagagcgctggcaggaacgcagatcagaggcctgggctagatgggaccagttttcacgactctgctagatacggtgacattttttacggttttgaaaatgagttaccatagaaatggatccaggatggactaatgcaagggaggggagggcgagaaaggaacacagccctgcggagcctggagccggccctggtgcagctgtggcaagcgccctgctcacccagaggaggagctgggggccctggccagcggcagagccagaagccccgcaggccgcctgtgctctccacacctgaacacgggattctgcgggagagctggtgtcaagtcctgacccctctacttcgttccgaatctgggagccagaactactgcctttggaggaaagaggagcccggagacccgagcccagaaactggggcactgcccggctcctgggaggccacagaacagtggcggcccctgcaccccaggcctgcccaggcctctcagccgcacacattgcggccggctgcactgcggcatcattggtgttcacaggacgggccatagcaactgcttctcccttggtttattttttaatgtttcttaaagacggggtttcgctgtgttgcccaggctggcctcgaactcttgggctcaagcaatcctcccacctcaccttcttgggtacctagaactacagtttccttccttttttccaaggcatcgagaagctgaaagagtccttacaagccccgcgtgcagctccagagacccccagtagtgagttccggccaggcctcgaggtctgggtttcagggcagagaaggtattggtttctgcctttgcagaaaaaaagcctggtgctcgctcaaccaaaagaaaagctaggcagggtttttgccaaaggaactgtgtaggtttggaaggaaaaggcttcacaacccagaaactggagttactcttgtcagaagacggtggtgagaaaatgaacaacagttttccaatgctacaggattatgtttttaggacaaaagtccttaactaaaggccattatgatgtttgtctcgtaggggtactgaatatgctgagaaaacgatgcagacgcaccgcccacccggcccgggaggtgctgcgtcttccctgtgggcagctgcagggcccacggctccggccggcccaggaggagggagggcggagcggctggtcagcgtgattctcgtaacagccacaccgagttgtgggtgcagcccctgaggggtcaggaggggtcacaggaaaggggccgctgcggaagccctcggcctggggcactggttccccaggatggcagagggtcttggccatcacagactgggtgagcacatcagagggcgtaacccgctctgccaacccctcagccttggggtggcggctggcagctgtcacctgcaggaagactctgtcttctctgaactgctccgacagccggggagcttctgggattcagagtcagccagagctctgagtaaatttccccgccgtgtatgctatttggaaagctgtggccattgggctctgaacaataacttctaaaaccattcattatgatcttttattacttttagtctagacatgaaaataggttctccgtgcttacagggagttctgtgagtgccagcaggggccctttctaagctcaacatccccggtccctgactccctgccgggcaggacccaggcagccccacctccttcctggtggactcgaatccgatgggaagttctctgcggtctgttttggggactggcagattttacaacaggacagttcatacaacggagcctgagagaagattgtggccaaaccagggaaagacgtgaaataaagacagcagttccgtgatcacagcgtcatactttttactagtacatagttataaaatccactgtcactaaaaagactggcaaaaattagatttttttttcccctgttgagtcgcaaacagtatttcgactttgatataagtggaagtctgcacgaaggtcgacaacaatagcgttggccctcggtacgcgtgggggactcaagggcccagggcccacgacgctcagtcctgctaggaaaggcgtgacagctgtgcatcccccacacacatcccccatcgtgcttgcatcttctctagtttccttataatgccaaacccagcacagtgtgtcaacagtggttatgctctcttgtttttttttttatgtgtattactttttgttttgttttcaaatattttcgatctgcggttggttgaatccatggatgtagagggccaactgtaataaaaatctgtttttaaaaattagatgaaagtggccaggcgcagtggcgcatgccggtaatcccagcactttgggaggccaaggcaggtggatcacgaggtcaggagatcaagaccatcctgcctaacacggtgaaacccgtctctactaaaaatacaaaaaaaaaaaaaaaaattagctgggcgtggtggtgggcacctgtagtcccagctcctcaggaggctaaggcaggagaatggcatgaacccaggaggcagagcttgcagtgagccgggatcgcgctgctgcactccagcctgggcgacagagcgagactctgtctcaaaaaaaaaaaaaaaaagttagatgaaagtagcagctaatacatctcacacacacccccaccccgccctgcacattgccagggtccttacctggagtgtcctgtggagccctgacctagaccccgggtgtccgcgtctgtggcccccacattgtgggtgaggcttgagcagccaccagcctgcaccctcctcgcagtctgccagggccgccgggagtggggggcctcctgccgtgcctgccctgggttccgggcttgcccagtgccctattcttcacagtggcctggtcctcacccccgggtcttgtgaggagggttctcatataaggccagctgcccctcacagccccttcacggggcagtcgagcctcgtggggagctgcttcaatgcctcactcagctgtggggagcccaggaccccagaataatcaaggggagtgggtctcaggtgggcagtcatcaacgggcatcttacggggccatcctgtcacccatgttagagagtgtcgtggagctaggcggtagcgaacttcgccagtgaggccgcatctcctcctcaccagggcctgtcgcgggagggaattcaaagccaaatctcctagcccacccacccactctaaaaaaaaaaaatgaggacgcagccatcgccgatgtccttgtgttgcacggagcagttcctaggagccggctccgctggggtagaggagactctagggatgttcctacagtctggaccgattttacatttccgagacttgcttgtggatctacacggctatcgcagagctgtgcaatctgagagctggaaggcttcggttctgtcccagtacacgcggtgcaggaccacggttgagcagaaggtgcatctgcgtggcaccgtggcgctgaagtccaggtgtgcttgggccctaggctcccaagacgttcccactgcctcctcctgggcacaaggctcaagcacagggaccgccggccaggcacacatgtgtatgggcaagacccgcaggggacgtgtccctgggaagaatgcttcctttggttgaaggctgtaaactcgccctgtgaggtgagacatgtcagctcccagaaaaggtcccagcctctcatgattcacgccagcacaggcagcacagcagcagagcgtgacctcctagatggcagcgtgacctcctagatggcagcgtgacctcctagatggcagctgagctcaattccacacggctcagtcctggagacaatcactcactgcaacacgcattcctcatgggggcctcttcaggagccacgggcatggggcttccctgacctctgcactcacggtgggggcgcgcacagcaggggtagacactggcccgccatatctggagctgaagtagagcccgtcttgggctcgcttagcggagaccataggtggaggtgagccagtggcctcaggcatctgcagaacccacgcacacattgactttcgcacccgcctccatctccgtggacttgactgtgtcgtgcaaaacccactccacgtgcgcagctgtgttcctgcagtgacacgaggccctccactggctttcgatgcttcagctctttcaccaacaatcaggtggactggaatcacacctcactcgaaaccctttgaatctctatttagtgaacaagcacttgcttctcagcaaattgtctagcttccccaaaaataaagaagatggagttctgtgtggctggatcccttttcagctcccagcactgagggcagggccctgtctgcctccgcctctgggttgaagcctggcagtaaactggcactcctggtgcccgcaggcaggggaggcagcgcctggccccgctctgccctccacgctcagcgcctctggtcctcggcccagcccttgctggacatgcagcctctaccaggattgctgcttcccttctcggcctctctgggtccagcgtggcgtggacaacagttcggcaatgcctgctccatcagcctcctccctggcctcagccaatgctgactgtgccaggagcccacatagcccgtgcctgcccccccttctggtttccaagtgctcacagcctccaccccacaatctctgattggctcctgcaggcttccgtcaggtatcccccaaggctccgcgtccccatcacctccgtgttttattgttcaatgtcttagatcttgtttgtgctaccccctctcgctccacccctcctttgcccagagaatgatcctccttcccttcaaagcccagctccttcgtgcctcttccaccaggccttcctggccttcacttcctagcccactgctgacagaaggagtcactctcgctccttcctgcatctccctgaggccgcacgctgtcgtggacgtagcatggctcaaaggtttgatgggtgtgcgttcacatccttcatcctctgggcctcaccttccttggcgacgctgggggtaacacctgcctgtaggattgctggggaattaaataggaccgagcagccgcaccgacgaatcctcaccgacgaagcctcagcgcttccctccatgcccacgactcaccagtgttatttataaatgagtctgagtccctgctgggtcctgccttgtctgtctttgtatccgagtatgcagcacagaaccttgcattgagtgttgggtgagtcgggagaggcttagggacaaaagtcacagcacatcaacctttcgtgaagtcctagcatctcagagcagggccagtgcctggaggtggacaggaagcacgtggaggtgggcaggaagcactccctgggtcacagtgcacagcagcacgtgctgaacttggtgcagtgcagacgtccatgccacatgcaccactacccatgggctgcggcagctcctagaaatctaggatgtgacatcagacgctcctccgggagtgtggtcatgccctccgatccgctgaggcatttcaaggaaagttacaccctttccaacgcagttttccttttagaaagatttggcctcagtagatgaatccatgtgatcaagcctagtgatcagctaggattcttgaatctcgggacccgttgccagaataacaaaatgggggcttcctgtaacctcggctctttaaagcaacacttctgataccagggttagggtttcagaaaatgcagccgccttaggagcctcattggcagctactttccactaaaacatcttccatttctctctctcaggagtttcctttaacagtgtttacactcagatttggagagtcctgctgcacctggctgctgacccctatccagaggtctcggacgtggccatgaaagtactcaacagcatcgcctacaaggtacgtgccgggcgctccccaccgcgctccagctgctggttctcggttacgagtatgcatgccaggaactccaggtgtgcccgggtccacaccacagtttagaaagtaacaaaacgagcttcagcaaatatcttaaatctggagatgtacacagtacaccccaaactgtgtctgtgcagctcccacgtgggcagagggtgctggatttactgatgcctgtcaaggcaattaggggaggactgacattatctttcaggatcctctggtgtctgggtgagctacagtgctggcccttcttccattttttttttctttctttacttaattatttataagagatggggtctccctgtgttgcccaggctggtcttgaactcctgggctcaagggatcctcctgcctcagcctcccaaagtgctgggattacaagcgtgagccactgcacctgttttttgtttttgtaagacagtctcactctgtccagactagaatgcagtgacctgatcacggctcactgtagcctccaactcctgggctcaagcaatcctcccacctcagccttggaagtagctgggactacaggtgcacaccaccacacccggctaatttttaaattttttgtagagacagagtctcagtgtgtcgcccaagctggtctctaactcctcagttcaagtgatcctcctgccttggcctcctgaagtgctgggattacaggcatgagccaccacacccagacttttcttccctttctgatagcagtaatttttgactcattcaaaacccttctagttaatggtttcttattcatggccattctagctcaagggaacttttcaaagaatcagtttttggtttcattggtttttctctgttgtttgtccattttccatttgattgattgagctttcatcaataaagcttgctttcttctgcttactttgagtttaatttgctcttctcatcctagtttcttaaggtagaagcagaggtcattgattttagtcctttctctttggggactgtaaactcttctcagtcccttttgtgagctctgggcatttggcctaccgccttcccgctgttttttctctgcctcatgggttgtcactctacccttgagcagatgaatacttagtcaaagaccccaggggcctctcctgcagaccttggaagctttcccctctccagtgctctgtcctgcaaattgtcaccacctcagcctccctggagccccagtctctgtctcctgttccctgaaagtgctgggctccccgtctctgcactgtggcctgggactgcctgaaactacctgcaagccggacacagggcagctgtttatttccgttctctcagggatcacaagcccgtgacacccagcacccagtgtccaaaaacaattgtttacggtatttgtcctggttttctagttgcttatggaagttggatgatttatgtggaattagaagtcactcattatagcacttaaaaattttttggtaactttttgataaaacttcaaaagcttacagaaatgttgcaggaagaatgcagggaaaggccacactcttgcagcctctgtggtgttctacgtcttcatctgacctcgtcacggctatggcgttgcctcgggtatcactcagtgccagggtctgcagggtcgaggagccacggcttcccatcctagtccatcgctttttccaaatgagctatcgagtctccccctctcatttgctgtggccttctgggtcctggccggccatcgagccagggttcctgcagctcctcagctccttttgctgatattatacttctgtggctttcggttccttcaactaagttattttctgttggtctagttatatcttagatggaaatcaccttaccgtctgcagttggttcttcttcagttctttttttttttttttctcttgctctgttgccaggctggagtgcagtggcacaatctcagctcactgcagcctccgcctcccaggttcaagcagttctgctgcctcagcctcccaagtagctgggactacaggcgtgagccaccacacccggctaatttttgtatttttaggagagacgaggggtttcaccgtgttggccaggatggtctcggtctcttgacctcgtgatccgcctgcctcggcctcccaaagtgctgggattacaggcgtgagccactgcgcctggcctgttctttatggtatcaccggtatagtcacaagtagcctattggccaacttggaaaggtccagattgtttaattctgcaccggcctcccctcctgcagcggactctgccacttccttcgtcaccgcatccctgcagcggattctgccacctccttcgtcaccgtgtggtgtggccagctgcacgggcacctggagacgttcatccccaggcagcaggccatctcctcaggtttcttttatgtgctactggcctgttgaaaatagccagtcaattaagttaatgttttcattatgcggtaagaaaactaagaaataatataattatttgcttttaaactaggaataagataaatacaaaaataaacctcaggctgggtgtggtggctcacacctgtaatcccagcactttgggaggccaaggcgagagacgatcacttgagcccaggtgttttgagaccagcctgggaaacatagtgaaaccccgtctctacaaaatagtagcaagttagccgggcacggtggcaagcacttgtggtcgcagctacccaggaggatgaggctggaagatcccttgagcccaggagctcaaggctgcagtgagctatgattgtgccactgcacttcatcctgggcggcagagtgagaccgtgtcttttaaaataatgtttaaaaatatatgtttgttacacattatggtctgagaccaagaaggggaggcagtaaagcagacaggaaggaaataaggaagaaaagaaagtcataagactgcacaaacacccctgaggaaaccacccacggaggccccagaccagagcaaccggtcccgaggcctctcagatgagctgacgctctggaggattgggactgaaaccgtcacatctgcctgctacggattagggaaaatcagttcttaccacttaccactgcccttttagactctaaatagcctctaccacttttagtttaagatttcaaggttgggttttaaatagccgttttcactaaaatagttgtaaaagctttttacgaacattaataaatggtttaagtttttagaattgatggccagttcgcgtctctgctggcagttctctgacacacaggagtgtctggtggcctcttcttttctcttggaggcacaggatggctgtggccatggaccacccttgctctgtcctgactgcacagttggaggccagcgctatttaggaggtttgatcgttttcccccaattaatttagcttcttgggtattttgatcatgatgaaatcagtattcagcctatttaagtttatttttcagtggcttttgtgtatttaaccttactgaaaaattagcctgaattattttaaactgtaatccgagtgcctaatcttgaaatataaggactattaagtgcgttcctgtggacctggcctccagttgttaaatagctcctcttgggaagctctcgagcctgtgtagcacagaagccactgctctctgctcttcagcaaacgtcccagcacagcctccacagcccagcgcccttttggattgtgtgtgacatgtagtgtagctggacggcccgcccccctctcccaccacggtaaggcagttaagcacctgcgtctgcctttcatgttagcaggttatagcaactcgaacacacggctttgtcgtgctatccgattgagacccagaaaccgccataaaagtggcatttgccttctgtgcctgctttgccgttctagaatgacacagagaccttaaggcacatggccatcactccagcagacatgccacagccagaggggtggagaaggtcaagagaaggcctctgctagagaccttgctatgcatagcacaatgcagcatgagcttgtgtgtgtgtgtctgtgtgcgtgtgtgtgcacgcgtgtgtgtgtgtctgagtgtatatgtgtgtgggtttaagagtaaacattgctactaaagcatttggaagcataaatctttcttgtcttcattttaatttcaagaaatgccttattttcctgctctaggaactgaagggattacatttcattttacagagaaacgagcctattttagatatttaactctgaagccaaatttttgttcatcagagtctaaaacagccttattactatggaatgccctgtagaattctatattcaaatacagaaattgccaccagctctgtatgagagaacccacacagctccagagctgtggtctgatttcatgtatttataatatatttcgattcccattccatgggcttggggttttcattttgcttttagctcccttttctcttggtttagttttgggggtgttgtttgtttgttttgttttgagacagggtctcactctatcacccaggctggagttcagtgatccagtcacggctcactgcagcctcgacctcctgggctcaagcgatcctcccacctcagcctcccaagtagctgggactacaggggcgcaccaccatgcctagctaattttcgtattttttgtagagatggggtttcaccatgttgcccaggctggtctcaaactcctaggctcaagtgattcacccacatttccctcccaaaatgccaggattacaggcatgagccactgcacctggcctgcttttaggtttttttaaggaaaatttcagactatgtagaagtagaaagaagagactgatgcccctcaggagcctgcctgtggccccagcagttctcacctcagtggttttaggacaatgccaagaaagaaccttcaagccacaggtggtcacctgtcagggcacatgttctcatgatcactgcttatattataatttatgagaaaacgtgtgagcataaatgcacaaactcacctagaagcaccgctgcagcctcttgatactgtgaagagtgtgtgtgcatgtgcgctggccgctgcctctgttgcaggactcatgcatgcagacggagatgagaaaggggtgtacttaacgaaaggtcaaattgatggcagtggcagccagtctgggagcggccactgccatgatgccagctacagctggggaggtgtggccagggccgtgtgctccacaaagctggcaggaggcagggaccggtggaatcccacccccttccaaactggcagggtgggagcctcatgctccccaggtgcagctacagccacccagccacaactctggatccaggcatctctgtgctcttgggggccgggagcaggcaggaaccccaccctcccaggcacagctgcagccacccagccgtggctccagacccagccatctctgctcttggggaccaggagcgggcaggagctccaccctcccaggtgcagctgcagccacccggcatggctcctctgtgctctcaggggcccaggaagtgcccctacccctgcaggcttggaagcgtctgctcccgctccctggcctctccctgctcctggcacccacttcaatctcggagcaaagttgaggctgtacccaggtgctgttgcaaccagccggctgtgcacacgctcggggcagtgctcacatgccaaccacctgctatgtcagccccctctggactttgggcaccaacgagcatgggagggaggctgagggtggggactgagggcagtttggcactggcctgcaggtgcccctcggcacaatcagcctgggtgttatggatgatggcaggaggcagacagggtcctgggcagaaaggggcaggtccccagtgaagtgccaccttcaagccagggacagcctgaagcctgggggctgggctgatggaccagaatgggaacttttagtgctttttccaagcctgcccatggctgcccatgaatcagtcagcacatacttcctcccctttgaagcccataaaaaccctggactcagccagactcaaggaaacgatggcataacctgccttcagaaaggagctacccatgccggggtctcctctctgctgagagctgagcagacgttgggaaaaccagctgcagagaggagctgcacactccagggtctcctctctgctgagaactgagcagacgtcgggaaaaccagctgcagagaggagctgcacactccagggtctcctctgctgagagctgagcagacgtcgggaaaaccagctgcggagaggagttacccactccagggtctcctctctgctgagagctgagcagacgtcaggaaaaccagctgcagagaggagttaaccactccagggtctcctctctgctgagagctgagcagacgtcgggaaaaccagctgcagagaggagttaaccactccagggtctcctctctgctgagagctgagcagacgtcgggaaaaccagctgcagagaggagttaaccactccagggtctcctctctgctgagagctgagcagacgtcgggaaaaccagctgcggagaggagctacccactccagggtctcctctctgctgagagctgagcagacgtcgggaaaaccagctgcggagaggagctacccactcctgggtctcctctctgctgagagctgagcagacatcgggaaaaccagctgcagagaggagctacccactccagggtctcctctctgctgagagctgagcagacgtcgggaaaaccagctgcggagaggagctacccactccagggtctcctctctgctgagagctgagcagacgtcgggaaaaccagctgcggagaggagttacccactccagggtctcctctctgctgagagctgagcagacgtcgggaaaaccagctgcagagaggagttaaccactccagggtctcttttctgctgagagcagaacacttatcaggacagtctgcctccggagaggagctaccaactgtgggtctcctctgagctattctgttgctcagtaaagctcctcttcagcttgcttaacctccacttgtccgtgtacctcattcttcctggatgcaggacaagaacttgggacccaccaaatgtcagggctacaagagctctaacacaaacagggctgaaacatgccccttgcttgccactttgcagatgacaagaaggagagaagagaaaaggagagaagagctgcagcccttcagggaacccagacctaggagctccctgagatagggctgtgatgccatctctggggctctgcagttcctggcgtctccaagcttccaggtgccaccacgttccccagtgccagatgttgaagctgcttgtagtacacctggcccagccacagccttgcagggagcaggcacccatgccagtgcctagagctgcccacccccctgcagccagcatgcatggctgcgcacagtggctggaccccacattcactctcacacccctcaccactctgcgcctggcttgcctttggcaggtgtgagatgcgggccagcagtgtgagccaagcgcagcctgccaggctgaatgggcataacaagcccagtgggtccaagtaaaaactcgggcaaaggcgtcaccagccacagaggtttctggctggcaaagcaataccccaaggatcccatgacattttgatttacttataaaatgaagacctaagttactgataaagtaaataaacattggccgagtgcgatggctcacacctgtaatcccagcactttgggaggccaaggcgggcggatcacttgaggccaggagttccagaccagcctggctaagagtctctactaaaaatacaaaaattagctaggtgtggtgatgcactcttgtagtcccagctactcaggaagctgaggcacaagaattgctcgaacccaggagacggagattgcggtgagccaagatcacaccactgcactccagcctggcaacagagcgagactcttatctgaaaaaagtaaaagagaatgaaaataaagattgagatatccaggaaagcatattccaaagcaccaaacatcctaagcctgatgcctggcttcatgctttcgtagcatgagttacttatggataggtttcattttttttttttttgagactgagtctcactatgtcgcccaggctggagtgcagtggcgcgatctcagctcactgcaacctccatctcccaggttcaagcaattctgctgcctcggcttcccatgtagctgggattacaggcacgcgctaccatgcccagctaatttttgtatttttagtagagacggggtttcaccattgttggccaggctggtcttgaactcccgacctccagtgatccacctgtctcggcctcccaaagtgctgggattacaggcgtgagccactgcacccggccatggatacatttcttttaaaatcacattgtcatgccagaattttctctcctcctacttgacagcctctcttagaacccagagagcccggtctgtgtctccctaccctctgttctctcaagctgcctgaatcgtaaggatttcttaattcagcatgtttgcaattaacctctagaccaaagtagttctgcactgctaaaactgtctttacctctgaaattctctgaaatttctcttccagtgatctcagccgatctgcatatagatattctgatttctttttaacctcgtcaaatggcatttccttaactgagacagacagttctctgttgccaccgtgatccctccctctagaactgcacctctctgaagccattggactctctcccagctcagggcccctccgggaatcgtgagctctacgtccagcccctgaaggccgtgctgcccatcccacccctgcctggtttcagcggtggcctgctgtgtggaagtgtctgactgcctctcccaccaagccacgggcgtgcacaccctctgcatcctcagcaagcgttcacctcacctgtcttagttcctgcacctccaccacaaggatggatgctcagaacagtgggatgagccgccccaggaatgtggcatgccagcagcactaatgaacatgaacagcctggacacatgtcacacctatggcttgaaagcttgtcatgcacatgctcattcccctcactgcagacctggggaacgagggcagcatcagcctggactagcatagctacagaatcagatgtggccctgccttagagccacgctgcccaatgctggcccgtgggcccctgcccagctagagcagaggcacccctggatcgcccatccagacagagatgccctgttcccctgcggagatgcagactccaggctctggggtggcggccgggaatctgttctcagtgagacagtactgtgcagctgcaggcagcggctgccccacgagcaccctcgcgggggtcatagccacgagcaccctcgccggagtcatagccacgagcaccctcgccggagtcatagccacgagcaccctcgcgggggtcatagccatgagcaccctcgcgggggtcatagccatgagcaccctcacgggggtcatagccatgaggcactaggttggctcttggagcctggggctccttcaggcaaggacaagcaccagctttgccctgagccccattctagttctgctagctttcagccagtgacttcatgcctctcagcttgcatttctcctctataaaacttaaaactgggatcattgtatgactcccaccccctagggctgtggtaagaaaggcagagccccgtccctgtgctgcctgggtgcagcgggggctccatacagcaagctgcatcgtcagcactcgtgtctgtgtcctgtgccgcccaggtgcagagagggctccacacagccagctgcatcatcagcactcatgtctatgtcgccatcagctccttggccatctcaccatcctctgtggaaaaggggccacagcaactccagaacctcccgagccttcccacacacccgggtctgaggagggaaggagctggtgggctgagacacctcggcctccactgacgcggcgttctcttcccgcagcgcctaggactgagggcaccgtggccccaagtgaaattccttaaggcttcctttgtaactaatgggcatcttgttaagagtcaccacgttgctttaatggaataatacctaggacttacttttccaaaagaagagttcgtaggatttatctaggaaacgcagtttgcaggaaaatgacttgaagaaatagcagcacacgcttttgcaggggtttcttctcccccaccaagcagccagcggcctctgcgctattcttagcccaaaagtgcctctggataatcctctgggaatccctttttaagagtttctcacacatgaatccagatcctcgatataaaattaacaggaacatttctgaaatactccacttcctcccaagatagagcagccagaagctgacgctggcatccgcagccctgactgtgtcaagatccagtgggaaaattcactgtccaagtctctgaaatgtacggtattttcatctgcattggatcagacgcccccgtgtccttgtgaggtggcgctcccggaacaggagacagggtgggtctcattccagtccccgcttcagcagctgcaacagtcgggggtggataaaagacacctgcacctccatcttccaggcgtgttcatgtgcgcactggcccaagagagtgtctgtgctgagcattcgactgttagcaaagtcgtatctgccaccaccgaaggttggcttggggagtggaagaaaggccctgtcttgtagccgggaccttgaccctcttacagctgccgtcctctctggacgcagacctccctagagggcatgtttgcacacccttgacctctgcaggctgcgagtgagccggggctctgggggtgtacatgctgagaagggcgccgtgtcctccaggcaggcctgggcccacagaggctgtgcgggccgcactcagccctccagtttgcatctccaaacccagcctctgccattgccgtgccctctctgttcacccttcctggtgctgcgctctctaagatggtggcagggaccagcagaaaggactctccctggtcctctgcctttgcccctgccccagccagctctgcagctcctgctcgctgcgtaccctgtcctcacaccgacaccgcaggcaggcaggtctgccaggtcacctctgagggacacgctactcatgttcacaatcttggccccacacccagcgcaatcaacgctgagtaaatgttgaacaaataagaagtgcacagctaaagaaagctccctccaggccaaccccctgtggtcactacactaatgggggtggggggggctcctgatccaggtgtgtgtctgtctcacgagatttccagaagtggtggaaaattagttttgtgacagcagccccaggtacaagccatgtgaaagcaggatggtctcatcttataaccccaggggctgcgagaattcatgccgaggcccggatcagttccctgcctggaagagtgggcagagcagagggttcgtcaccacggctccatgcggtactcccacgggcgcttccgtgcagggtggcaaggcgggagctgcacagaccccaggcggctcagcgtgacgtcccagggctcctgagtcaccggccccagcccagcagcgcctgagcctttgtgctccgtgagcgtctgagcatgtgtgggttttgctaaaggcttcatttcaactccagaagttttctgtcttccccgtcacctcccactgtttttccagacattttgagaaggcacatataaagttcacagtcgaaaacttgcttttctctttttagacttttgaagggatcatatgtctggcaggttctgtgggatggttgtatgtgtctagggctggccgaatagtttaataccaaaacaaaacaagctcagaaagaacatgtattactcttgtcatttaaaaaataggaacgttgcttaaagacaagttatggttccattttcttgctatttgcgttttgaaggaaaggacaatctgggaagcgtgggtgttacatgagtgaagacttcaggatcgttttgttttccttggtgttctgttggctgaattgcaggttcaaggttcctaaattctaagtgaataattaaaagcatgagacattgcaggctccacgcggatgcggacctgaaggacagggttctgtctggctggagcgcagcctgggatgggccggcgctcagggaatggcttgtgcctgcgggatcagtgggcaccttcatggagcagctggccccatcctcctgacacagatgaggttgccccagcaccatcaggccccttctgaacgcgcacagcctctggagtccagaacccagcgggacccgcattccccccactgagcagtgtactcagaacaaaaccaccccgaagcacctgggccctcgcgaggtcatgtcggtggccgggcagcgcacgccctgccttgcgtggtttctcacggctgctcactaacgccgacagctggtctccagatccacagaaaaccctgctttaaaaaataaaagcaaaacctcttgcctcctgaatgccagggctcaagctggtacaaatctttttctgtggtagaatttcaagccctgcaggtgtctgtggcaggaggctctcagagcccagggtcttggcttcatccacagacggctgggttgaaggggtggtttggagcctcatgctgcccactaggctgtgccagctgtgcaccaccctgctccccaccctccgggagcagccatccccttcccctgccagtgcgcccctccccagggcaggtttcagccatgtctgccctggagatgaaggttccccgtccatgcagtgcacccagcaccacctgcgtgcgcccgtgggaaaggatgaccacagcccctcggccaggaggatgttaagggcggtcttgagttccaggccccgtcacagtccaggcagcagagcccattttgccactggagagagcccaagccccctgcagtcattctctgacagtttctgtggcctcctgaagcacacgggggtgtaaacagtggcctgcgtggaggcctcaggctgctggtggctttccaccccgtgcccaccggccaggtcccgggtggatgaagcactccctgaccctccgtgaatgccacatcgcccggctccggaaagagcatggctggtggattcttcccgggcctcaactcgcagcctctgacccgagagctgaggtgttggggagaattggactcaaggctgggacagtgtggaggcccagcctcaggcaagggggaggacactgaggccgccaggagccgcccctctggcagggaaggtgaggagggtgggccgtcatccatctcagaggcttcaggccctgacccctcaggagcctcaggcagagcttcctccccagacatcccggctcacacggccacgccagggctagcccagtggatgcatgtccaagagtaaagaataccacttgagcttcaggattgcctttgcgggggatccagctggggccttccattggtgttggtgcttcctcggccaaaggccttttctgtgattctgaagcggctccacgccagcctctgcttcgtgtggcggcctccgcggagcacgtcccgtctgaccttcacacccccattcctttgcccctaggccaccgtgaacgcccggccgcagcgcgtcctggacacctcctccctcacgcagtcggcccccgccagccccaccaacaagggcgtgcacatccaccaggcggggtaagtgccgcccgctcagcctgcaggtccgtggtggtgaccggggccccacgggctgagctgtccctgagccggcctccccatcctcctccttccccgccctgtcttggcttcgtctcctcccccctctccagcgggcgttctttccctctccctcccggacaccccggtacccgcctgatctgagccctgccttgagctctccccatcttgaggaacccttcatgtgcacatcatctcagcaaaagttgaatgaagcctggtctctgtggcctttcagagtttgtaagaggggatctagatctccaaatgggtaaccaacaggtgtttgcacctcaggacgtggcactgctgtgtgctgagctcgcacatcccggcccactcgactctgagctgggttcgtcctgtccgcgccacctcccagggtgctggagttcaatgagggacaaccctgccccctgccaggcgggcaaccgagcagcatggactcggcaccagcagctggggttcgggagccatgatggcatgctgggtgactgaggacaccccgggccctggtggcacctgggagggtgcaggtggcccaggaagttgttccatgttccctctcgaagccccagactctgcagaggatgcagtgtttgtttttcttccaatggcaggggctcccctccggcgtccagcaccagcagctccagcctgaccaacgatgtggccaagcagccggtcagccgagacttgccttctggccggccgggcaccacaggccccgctggggcgcagtacacccctcactcccaccagttcccccggacacggaagatgttcgacaagggcccagagcaggtacgggagcccggctgcctggtgatctggacactgagagcgttgcttctcagatgggggctcatggcctcagcctcaggctgctcacatcaccatgggatggggcaggacccaccctgccgtcctgggtctgtgggccactctctgcctttgcagacccgggtgctggtcctcactcgtgcacccctctgcctgcactccttaggagcactgctgggtgtgtcccggtccctctgcctgcactctttaggagcactgctgggtgtgtcccggttctccgcccctggttctggtttcaccattctgggcagcttccatgtaacgaaacaggagcacggagttacctggctctgcccttcctgggcacacagcactctgcgtccgcttgggggcagctgcactgcagagcatttgttctgaatgtgttgtcttttctgtgaacatccaagtacgctgcataaataggtacactctctttgcctttaactaagttgaaaaagatatttctggagagaggaatgcctgctttgttttgccagggttatgagagtggtgtgaggtggcagctggtccggagacctcggctgtctcgtccaggtgctgccactttgtcagttgagggcacctgggctcaagaaggtggttcagggcgcacccagcacacccagctgctctgggtgctgacagcatgatcatctcagcaatgagtggggtccggggctcgcttggtaatccagtgattttaaaagaagttagcggccgccttgcaggatgccctggagcaggaacggccatgttggggtagaagagctgtcacggcaagagcggacaggtccccacaggtgctgctcagccccagcccacctggactttccgtgtctcggcagaggaggagcgagaatcaccaccgagccccaagtgcagggtcagcctcctggccaggccctggggagcaatgctaccggcacgtgcagctcacccacccgaccccccggggtgggggggatgcacctctcactgcacctgccctgagatcatggggagctccctgtgccaagacacagcgtgagagacgccagcaggccacatggcgtggcacaggagacccctggtgcccagcctcactccacaagcacacacagactctgacagccctggccgccacaggttccacaacaggaaacacccaaagctcagtcctcctcagctccacatcctctttctccagtagctgggagctccagccggcctgcaaagctgtgcgctccgtccaggccacttcacatgggagtccccgctctcagtctggtgtcacggggccatcacaggagctgtcctggaaccaagcggcagaggctttttgggggttgataaaccagcacacatggacgcacgtggcattgtctgaacagtcagttagaattgacttgggagctgtgctgggtcggccctggggatggtgggaccgacgtggctcacacttcacagcccgggcccctcaatccctggccagacgttcaggggttcttggtcaccaggatacggaagtgagcagagcacagaagtgccgtccttaggggcagcccggtgctcccggcagcgcctttgtccccagctgcagctcttttgagctcaggagtggcatgactgactggtgtttctttttccttccaaccctcctgcttaaaccctgaagactgcggacgacgcggacgatgctgctggacacaaaagtttcatctccgccacggtgcagacggggttctgcgactggagcgcccgctattttgcccagcccgtcatgaaggtgcgcccggggtgtggggttcagagtagagtcctagcgaacatgtgtctgtcccacttctttgagcataaacgctcaaggcttgtggctgtgggagcgtcccattgtggtcgtggtagtgatggtcacggttgaggtagaaccgcagaagaaacaaacttcacttaccttcctgtcgccaaacgaaaagagaaaacctgcctcgctggagcttcccagtgtgacaggtgtcactttgccttaactgacagggtcaccacaggccttcccactccctaatggtgaggatcactcgaggcccatcccaaggccacgcttgcgtggctccgaggtctggggactgttagacgcagcctgctgcagccaatcctagcgcatttggggttacaccacaagaccatctctgaggctcaaccctgacacagccctaacaagcgccgtgtgctgtggacgcagtggctgtgttcctgcaggctggggcagggcggcggctctcggcctcttcgaggaatggggcgggagctgctttgtcagcacagtcccagtgctcatctctctgccagggcccagcagggactcgtggagattttctataaatctaaagtgcattctgagcaaacctgcctcttccctcatatataattgaaagctgaaactctcagcttattctcgattgtatatcaagcttgcgtcttagtcatctctgtgaatggtatttggaccccatgacagctcagtccctgtggtcctgtcttcatagtgaatgctgatttctgttcataaaaacagaaccatcaggcagcccctgaggcaggcaagccatgaagcttgaactacggagcccctttactgcaaagagagaggagttcgcctccctcttctcacatgaacctgggtggacagtggcctggctgttctagaaagcgtcttgccgggaagcatcaaacgccttaaatagccgttccctttgacccagtcatgaatctgctaaaatactgtcttgagaaaataatcagagatgtagatgacttccgtgttgtttctaagaacgaaaattgagattcacttaaatgtccacagagggtgaatagttaaaaagttatgaaatatttgatgagatattattggagctactgaaaagttaaacattaaaaatagtgtcctaaggaagcgctcatgacaacattccttaaaaagaaaaaatgcaaaatgcagaccaagaagccagatttacagaacaatcacagccgtgcttctcatacagacacagatgtgcatacgacggagaccagcagagcccgctcctaactagagattcgcaaatggcgccacccacgactgcactgaattgggcttcttttgtgcctcttctgcagtttctacactaagcacgaagcacctttagagtcgggggaaaagaatcaaagaaacaaaccccaggagatcattgaggctggtggattcagtcctagtcagaagcccctcaccaggcccacctgctgggctcaccgctgcttacctgcgggtggcatgagggtggcggcccctgcagacagagggaagtgccccttcccatcactaggaggcttctggttaggaaaggaaagcatacacaaatcctggaattggatgcaggaagcaggagccacccaaactctgagtgagccagagctgggaggtggctggacactgtgccaggggtgccaggccgtcctctagaactgcggcccagtctgttgaaaagtcaatggaatttagtctaatgttaacaagcttggtgtccttgatgcggtctcgtgcttaaggcagacaaggtcaggcgactaagaaacccacatggtctggtcttcgctcttgctgggatggcagtggctgtacatgttggtaatttcttggtgtgataacgagaggcttttcttgaagtccttgaaaaatgcctattctcagtcatctatcctatgatgaaagaggaatggcatagataatccaaaactcattgctcttaaacttaaaaatgaatttgacttttccccaaaggatttgctttcctttcctaagcatttttaagtacacagcagctgattgcaggaggaagttccccagaggcatgtggaaggccgtgtgtgtgtctgtctgtctgtctgtctgtctgtctctatgtgtgtgtgtgtatccctgtgtctgtctgtgtgatgtgtgtgtgtatctctgtatgtgtgtatgtgtatctcgtgtgtgtgtctgtgtgtttctgtgtgtctgtgtgtgtgtgtctatttgttccggtgtgtgcaagccccaagccagcgtctcctctccctttcttcagattagcagcccctcctccgcctgccctcatctcctccatttgcacatctgagaattcccgcccgcacggaggagctggagggtgtcagccttgtggtctggccctgccagcaggtcctgctgtgtggacactgcagaggagattagtccaaggggatccatgtaggagctgccatcacacaggaggttgatcaggaaacggttgctgaatgagtaaatgattgtcttcctctgcccctgccaagtatttgaaaacaaatgctcacttggttgtcgttgaaacaacaggctctgggtgtcatgatggaaaagagcgccgtgttgtggtcggcgtcgtctgtaactcctgatagcaactgcagtcttaggagtgtctttaacattagagaccttttccaaacttcagaagaggaagcaggacgtgttttctcttgtttaaaaaaaaaattgttttcctactttttctaggtggtattcataaaggtattcttttactgatttaattcatcatctaatgacatttgtgtaacgagctgcattaggaacttcttgttattagcctgcttcacatgtaaactaaaaatagctctaaggctaggattgaacctaaaaaagaacagaagaactgcaaacccgaaactgcttcaaggtatataagaaactaaaacagttaccaggtcacaaaataatgaccagtttacactgacatgcaactagcgattagcaggatgagcatccaaggacaccgtggtaaggacagcgtctgctaacgtttttattagttcaccgtcagatttcgtacaggtccgtatgactagaaagagccgtgttctgtctgcggctcacctttgattggtgaagcaacctcctttcttcccatgttggtttacggagctcgtgtctacattagaaaccacaaaagaatattaaaaatggtctgccgtgtgcttaagaaagaaaaagatgtattgaattgtgttctgattacaaaagtcatacaacttttttcttctctcagttggaaggtttcaaaaattgattctatccagagaatcaatccctacaaggctgtaggggcatgtgaactctcagacactgttggtgggtgggtccagtactccctttgcttagggcaattaagcagtaactgtcaggattagaaaagggtatacctgcaaagccagcaatcctgctaggaggcatatattcttaaaaaccactaatatacatgtccatgaaagggttctgcccggagatgttcatgataacatgatttgtaatgggaaaaagttgaaaagaatcacttagtaggagagttaatttaaaatgatggatccatgggttagaatactatacaaccattaaaattctttaagttgtatctttctatgaggacttggttggatgtccttgatccaaaaggtaaaataatcaaattgtacaaaatgcttgcacgagctctgtgcttctgtagactggaacaagcacgggaggaggcttggccagttacacagcaggctggccacacagtgacttctagaaggtggagttggagccaggcaaggggactgttctttttttcatcatttacttctggatgatttgaattttttagaaagaacagttattagttttgcaatttaaaacagactaaaataccatttttaattataaaaagctttaagagtcgatacgctgttgggaggcatcacacgcagaacccagtttatttcacacagcccttaaagctacagtggggatttccgtttggcggctccgcagagcatggggatcttgttttgccctgagagcatctgctcctctagggtggatgcggaagctgcactgcccgtcatcagatctgcggctgtgcagctggggtttcagtgcaccattagaaactcaggcagtgaaggagcgacttgagatggccatagtccccacgcagggttccctcccagcactggggttgccctgcctgcatggcttccggtcccgcttttctcactatgcagtgaacattgagcatcctgtcatagattctcccacaaaaatgactttttctgttttgttttgtttttctcctctgagaatgacactctgtgtgacattctttatataaacctgcagcaggcagagcctgagaagtcccctcgtgccaccctcagctcagttcatccttggctcatcctcggctcatcctcagctcatccctggctcatccccagctcatcctcagttcagttcagctcatcctcatccccagctcatccccagcgcatcctcaactcatccccagctcatcctcaactcatccccagctgctcctcagctcatccccagctcagctcatccccagctcatgcccagctcatccccagctcatgcccagctcatccccagctcatcctcagctcatccccagctcatcctcagctcagctcatccccagctcatcctcagctcatcccctgctcatccttagctcatcttcagctcatccccagctcagctcagctcatcctcagctcatcctcagctcatccccagctcatcctcagctcatccccagctcagctcagctcattctcagctcatccccagctcatcctcagctcatcctcatccccagctcatcctcagctcatccccagctcatccccagctcatccccagctcatccccagctcatcctcagctcatcttcagcttatccacttcagtctgctgtgggcttcacccgcctcaggaggacagctggctccaccccagctgcagcttctaaaatgggtgcttcctgttctttcctggaaagttcagaaggaaagcaaatggataggtcgattcccctccaggaagaccagaatagaataagtcgttggttttggatggaagctgcgtgaagaacacacttggtgggtggaagtgggagacgtagcttctctgactttgtttccactcagccaccaccagctggactctggtgctcgcagtctccgaggcagcaggacagcttcctcccacagctggggcagggaccgtgcagtgccattctgctcacctttctccacacttggctgtagtgccagcgcctgtctggtaaattactgctgagtgttaaacagtcaggggtcaggtttatcagccaagtcagacaggcttgttttagagaacactgtgattattcagtgttgtttaaattaaatacgtggttattctaaccgtgcattcttagagagtttcatcctggttttgcttggctgcacgtgcagagggtcctgtgggcagttccttcggcctcaagcgtatgggaaatattgctctggtaaaagccgcagcctggttccacctccgcctgcagacagctggaaagagcaccactcccaccttggaaataagaaaagggcagaaaagctataaaattctgacttttcctgaactcatcagagagctgaggtggcaggggaagtgagttgcccagcagggaagggaagaggtgcctccaaggagagccggaccatgagcaccagttccctgcagcagagcagaaggggccagcagggagaaatgctcacctgaaattggcagtggtttgcgcaaggctaaacctggaccaatggagaatctcaaacctttgggagccacaggctgcacaggccatggacgtccactgggccctcacccagaagattgaggtgggacacgagaagagcccctcagaggtgtgggcccgcagcaggctctcctgtgctgctccccacagaacataacctgcagctcctgatgaaagacagcaaaccctgtcgcccccagagcacaggcgaagacccactgccacagaagaactgcaaaagaaaaccttccatctccagcagggcgaggacctgccacgtgtggcacactgcagggagcaggacagagtcactgagaaggttccaccctgagacccagagacacaggccctgcctcagtcagagtctgggctagagcaacagagagcccttcggacccttccaacaggctagcaggctccaggcagcaggcacagcagtcgagctgtagcaggggcacaggagcatagagagagaagccccccaaggtgcagacacacgaggaaagccaaaaaccaagggagggtggggtgggaaccctggcaaaaaccctcccgaaacccaggccctgcttgaagcatgaggtagtgtgagaggaatccgaagctggccacatgctgagtgtcaccatggcaacagtaaaacccaagcccatttcagtgcctcgctagattgactgaactctttaacagtctagtaatagaggcacacccatttccaggcatgcatatatatatatatatatacaccttagtctctgctgttctacacatgaagtctggaattcattcagaaattaggagaggctgggcatggtggctcacacctgttatcccagcactttggaaggccaagacaagaggatcacttgagcccaggagttcaagactagccttggcaacgcagcaagacctcatgtctactaaaaagaacaaaggaaaagtatgagatgcccccaaaaatataagacaaacacgcctgccatcaagagacaaagcagagaaagacccaagggcaacccagatgttggaactatcagagatggagtggaaataaccaagattaatatgacctaaaggcattgacagcaaaggtagacaacaaacatgaacagatgagggatttcagcagagagttggacactaagaaagagtcaagtgaatgccccccagaggcctatctgtgacctcaaatagccaaggaaaaaaatcagtgaatttaaagacaggtctatagaaagtacccaaaatgaagcacaaagactacaaagagtgggaaaaaaacaaacaggattgcagatcatctgagagcttcaggacagtacaaagcagtccaacatctaaccacagatccagcaaagatcccaaatcatggtatatacagacacacacatgcacgtgcacacacacatatacacacacagctggacacatatctaagccaccacaaaccaaagataaagagaaaaccttgaagacctctggagcaaaaggacacattacttacaggggaacaaggacaagaatcaccacagacttctcattagaaactgtgtaagacagagatagtccagtaatatctttaaagtgctgaaagaaactgtcaacctagaattctgtacacacaaaaatatctttcccaaaagaaggtaacaagacaaacatatcctctcttgccacttgtcttcaacactgaactggaaattatagccagggaagttaggcgagcaaaagaaataaaacatatcatattggaaagaagaataaagccatctctgttcacagatgacatgatcctgaatattgaaaatcattcaaaatccattttaatagagtatcagaacttaaaaaccaatgcagcagtattgtacccacaagctcaatatccagtaaccatttgtatcagaatcccctacactagtaatgaaaaccctaaaaatgcaatcaagaaaacactttcatttataatcatagcaaaaataataaaatgcttaagaataaacctagtaaaagaaatgtaagacttgtactgaaacattattgaatgatactaaagaagacttaaataaagggaaagaaatcacacattcataggtcagaagactaacattaagttggcagaactccccaaatagctctacagattcagcaccatccctggcagccttttttgcaaaaattgacaagctgatactaaaatttgtatggcaatataagggacccagaataacaaaagaaaaatgtaagagacaaacatactgaacaactcacgcttcctgatttcaaaacttactacatagctgcactaattaagataccatggcattggcttaagagcagacatataggtcaatggatttgaattgagagcccagaaatataccttccgtcactgctttatgcctataaactctacaatttaggcgagatagacaaattccttggaagagattactacccagcgtcatttgatagcaaagagataacctgaatagttcctgtctattaaagaaaatgaagttttcttgctttgttttgtttgagatggggtctcattctgttgcccaggctggggttcagcggtgcaataccttccatcactactttatgtccataaaactctaaaatttagatgaaatagacaaattccttggaagagattactaccaaacgtcattcagtagcaaagagataacctgaatagttcctgtctattaaaggaaatgaagttttcttgctttgttttgtttcagatggggtctcattctgttgcccaggctggggttcagcggtgcaataccttccatcactactttatgtgcataaactctaaaatttagatgaaatagacaaattccttggaagagattactaccaaacgtcattcaatagcaaagagataacctgaatagttcctgtctattaaagaaaatgaagttttcttgttttgttttgtttgagatggggtctcattctgttgcccaggctggggttcagcggtgtgatcattgatctttgcaacctcaatctcctggactcgagagaccctcccacctcttcctccccaggagctgggactacaggcatgcaccaccagacacagcgaattttgaaattgtttacagagatggggactcgctatgttgctcagactggtctcaaacttctgggctcaagcagccacctcagcctctcaaagtgctgggattatggatgtgagccactgcatctagccaagaaaatgagtttttaactaaaaactcaacacagaaaacttctgacccagaaagtttcgctggcaactgtaccaaacctttaaggaggaaataataccacttctgcacaacctgtcacagaaaattaaaaggagtgaacacttcccaactcagtatatgaaggcagcatttttctgatatcaaaaccaaagatatcacaagaataaaaaacacagattcccaagtcctcagcatcgtattaacaagctccagccaggcacagtggctcatgcctgtaatccagcactttaggaggccaaggcaaggaggatcgcttgagtccaagagttcaagaccagcctgggcagcactgcaagaccctgtctcaaaaaaaaaaaaaaaggcattatacaaaaatcagttgtatttccatatgagcaattggacattgaaatttaacatcagtaccattcaaaatagcaccaaaatacatgaaatacttaagtataaatcttttttcaaaatatgtgaaagatatgtattctgaaaaatataaaacactgatgaaagaaatgaaaaggtctaagtaaatggagaccatgctcctggtttagaagactcaataatattaagattccagttctccctaaattgatacatagatcaatgcaaccccaatcaaaaccccaataggattttttttggtaaaaatagagaagtttattctaaaatttatggggaaaaggaaactaaaataaccagaacaattttgaactagaagaacaaagttagaagcctcacactatcttatttcaagacttgctataaaaaaagtaatcaagatggtgtgggattggtgaaaggttagatgcgtagatcaatggaacagaatagagagcccagaaattggtctacacaaatatgttcaattgattttcaacaaaggtgcaaaaacaattcaattcaatggagaaaggatactcttttcaaccattggtactggagcaattaacaaccagttgtcaaaaaaaataaaaagaagaacctcgatcagtacttcacaccttatacaacaattaactcagagtgaatcatagccctaagtgtgaaacctaaaactataaaacttctagaaggaaacagaaaaaaaaatatttctgaccttgtaggttaggcaatgtcttctttaataagatgcaaaaagtacaagtcaaaaaagaaaaaaacgataagttgggcttcatcaaaattaaaaactgctttttaaagacagttaagaaaatgaaaagacaagtcacagacagagcgaaaattataaaacacgtaagattaagatcttgtggctgttatacataaccctcaaaattccatgataaaggaaataagcagcccaattaaaaaacagtggcgaaagattttacagacaccccaccaaagaagatatacaggtggcaaataaggacatggaatgatgctcattgttaaggatcttaatcacgggaaagtacggacccctgcagtgagatcccactacacacctgttagaatgtctcgaatcttaaaatctaccaagtgttggcaagggacacggagcatctgaaaccctcattcttggctactgcaactacaagatgctacagacaccttggaaaaggttgtcagtttcttacaaagttaaacgtatgcctaccatgcaacctaaccattctactcctggatattcaccaagagaagtgaaaacatgttcattcagaaacctgtatgtgaatgtttatagtgactgtattcatagtcaccaaaaactggaaacaacccaagtttccttcacctcgtaaagagagaagctgatacaaccatacaatgaaagactcatcagaacaatatttaaataaactattgataaacgcagtggcacagatgcatctcaagtgtatcatgctaaatggaagaagctgctcaaaagactgtatcctgtatgatccatgtatacaacattccagggaaggcaaaactgtgtggaactgttctatatcttccacatttatcaaaactccgcctgtacctacagagggcgaaattcactgtacgtaagttacatcttcatcaacctcatgttgcggggagaagaaactcttttccctcttgtgctgaagtcacatgaaagatgatgtaaatgccttgttgaggagtgaacgtgcatagcaagctccgagcttcattcagagcttctcccccctccacagcttggcgatttgtggtaacacaaaggctgtgtccttggacgtaatgtacacgagacactggcagaatcaaatcacctctgttgcctgtggactcacgacgcacaccactacctcttccgcctcttcctctgctgcctctgtccacggaggggactttattgttcagtggggaggggatagtttgttgctaaaccgtggggaaaataataaaaagcgtcaaggggaaaagcacatcacagaggcaaatttgccctcacttcaggtcatcaggagctaagcgggtggagagggagggagctggcagtgtgagcgtttaatgtgttagcgatcttttcccatgggtgcctctccccttttgccttcacccaagtctttctcaatcttgatagtcatgtacctgttttgaattttatcccctgcaccttgaacctttctaaattcagagggattgaagataagactcagctctaaggctcccagattccccggataagaatttatcccaaaactgccccaaactgctgctttcccgtaagtcttctggggaacctctaatctccctttattcctgagccccaggtttttctttgcaacaggaaaggagttgtgtttcattggctttcagctgaagcctctgtgggaggcttcagaatcgtaattggtttctgtctgagtggaagccaagaggtacaggagtgtcaagatcctcatcatgtaacaggatcagcggcacccacagcctccaggagctctgtttacagggaggctcagcctgcactgggcctgggcccttttttactgaaaagcctttattcagcctgaagagaaacaggtggagaggaggcgacagagccgatgatgaagagctgcggtgtcatttgctgcctccgtgctgagcggcggtcacatcctagtttcccagggtgggtgcccgcatcttccacggcatctctgccttcccctggcctctccatccaccgctctccctcctgcctcacgccgcacctccacttctgcccatgcttgtcctgtgaccctcgtggtcatagctggttgtcctgacacagacacttggggtggttccggaaccgcgtcccgttcagaaagtctcttcccagcccagcaagggctgtaaaggaaggctgtgggctctctcctagagctcagattagggaagtggcggcccctacccctacaggcagaagcccctgggccgggagagggcccttgcagtgccgtggcaacaggacaagtgtggggccccctgaaacccctcagctcctgtctccgggcgtcctgtgcccctccctgttctggcatgggccccctctcaaccttgcagtcgtctttgttgtctttggagctgaggctctgaagccgccccatttctaccccccacgtctggattctttgcctgagctcaggcccaggaccatagagtgccgggccaaggagctggaattcccatcagttcctctcccttcccactcgaaagttccttctagactcttcctctaatttattcccagagaagcccgagtctcattaaagtgcaatgtctctgttcctgcacagctttgagtctttccaccgcgggttttttcttattactgttctatgttatttaccatttgtcatttcttttctaataagctcaggattgtcgtcaagtgaaactggttgctaagaatccacagtctatcccatttgccgttgcgggattatttctaaatcagaaaatgtgcggagggagccatttgacaccttttgtggttactgtttccgggtttggatgtcttttttgctgtgttgttgctgttttatcgagtgtggttttgtgacttttaagaagaaaaagaaggaagcagagcaatcaaatgctaggaactgagccacagccacccatgagcacggggtcagacatgaggtttggggcttgcctgtttctgttttgtaatcagagctgacacaaagcattcgaggaagagacacaaagaatgctctgtaagcatttgcacatgataaccacctacaacgaccgcctaaaactccacacggagaaaccgttttctttctccgccacatttacgtgcaaggacgcaaacacggccatgcgccatagtctttattcccatttcttctatcagagaaagcgactttttaataactaatgcaggctctctttttcctttgtcgagacagagttgcttttagccaaaaggaattagggttcttaccttgtttatttcatttattttatattttgggtcttcacaagtcttagtttcttagcaaggaacagaattagccagattgactggacggcatgtatgcttaaggaaatgcatctgcgtaacccagacaagtggccatcctcccgcggaaagtcaattaaatcctagttagtatttgccaagtgtggacctctcctagacgctgaacgtgcacaccccaacccacatgtgcgtgcacacacacagacacatgcacgcactcgcacacacgcacacacacgcatgcacgcaaaggccctgaagtgaatgaagacctttgctcagggaagagagggcagcagcatgtctagcgtctgcatatttcaagtgaaaataaacttggtctttctgaagctgtctcattagggaaggcactgaagttctcacgagttagtttaaccccagccaggcttgcagctcagcaccctcctagctcttccaccatcaggagcccagtggcaccccctctgctgcccaggaaggtcccacactctctcggggcccggcctggcctctcatgaggctgtcttccttctgtctcgtaagctccctcatcttccagccagctgcctggttccctttggcattagagagagaataaaggcagtgtctcctcaagcgcacctgcctcctgattgtgttttcagtgtttgaagcggcattcggtgcccccctgccctgctgctcagtgctgacctcagtgccccccattccctggggaggcgtttcccaaggccctggtccccatcatacacctgtcagcctcacaggccactcactcaagggtctcagagcccccacactagtgaacacaggcgtggagagcgcctctcccagctccggggagggaccagcgatgtgttttgtagcagacacaggacccacaacagcccgtgcctctggtgcactggccagacgagaagcccaaagccttcagcctttgagaaagaggtgccttcatctgaaaataactacagccaaccctccatgtccacaggtgctgcatccgcagattcaaccaattttggataaaaaaacaaatgtaaataacaaaaataaatttaaaataacaatacaacaagaaacaatccaaattttaaaaatacggcatagcagctatttacacagcgttgacactgtgtcgggtatggcgggcaagctagcgagggtttgaggtgtgccggaggatgtgttctgcttgtacgcagatgccacaccctttcgtattggggactgagccgcgcaggttttgctatccgaggggtcctagaacccataccccattgataccaagagacaaccctgtttcatcgctgggcttaactgggtgttttctgttgttgaagatcccagaagagcacgacctggagagtcagatccgcaaggagcgggagtggcggttcctgcgaaacagccgtgtcaggaggcaggcccagcaagtcattcagaagggtaagggcacccgcacagccagccaggggctcattccgggggtggggcctggggcgagggtcccctgtgagcaggccccccgcggcccacgcacaaccttctccagccatccactgtcccacgacagacccgccccgcaccccacctcccttgcagataagcacatcaaggctggtggagatgaagctgctgctcctcaaggttctgcagcccagagtggggaggggaggggccgggtgggaacccagccaccgcctgggaagagggctctcccgggaccctgcctcttcctctgcaagggcagccctcagccctcgggattatcagcgcaggtggaactcatggaggcggaactttgcatgttgacatttccggaagggaaggcctctgagagcccacatctccccacccggacaggtgtcgttgcgccaggccctacacatggcgcatccttccctggaaacaggaagtgaaaatgccaggccctgctttcctcagctggcctccacttgtccctgaaatggtggccagctctgtcaccccacatctcagtcatgattttcctaaaccttctcccagatttgccactagatgccaaatcgctcccttcacctaccttgttgtttgctctcccagctgcacccggggtggaggggcagggagcagccctggagggggcggtgtctgttgccgcagacagcggagggagctccttgcggaagggatccaggctgcaggcggccccggtcacagagactgtgtggggagcagggaggccctgagagtcaacacagcaatgagggtgtcaggcagccccatcccagggaccctggcctctccccaggatccaggagagtacaggggcccaggcccagccctacagccccactgagggcacggagcagcagtggtgtctccgcactcctccccctgccctcgcggccacaggctcccaccactgagccagctctggctgggggacctcaagctgcccccaaccaaatcagcaccatcaaaagtcaaggactctgaccccagtctgcaggtttattgttttgaccttgcatctttgtcctgtaaaattctggagattattatgggttactttctgaagttgaggttgatgacccgtaggacagatgtcctccctcctgccaaagccgagggccctgcccgcaggcagcacaggcgccatgagcgcgtcctcagcgagcgtgcctaggcccggctcacacctctgctctgctgatcaccgaaaacactgctgacttctggtaccagcaacgtttctgaagcgcattcccacgcagctctctctgtgaaagactgcggttcatctcgcattaacgcagacggtggctgttgtgctgaaagctaattgtggttgtttgtagccctctgtgcatctgaagagctggcggcagaccaggtttaaagcatcgcatgttgcaatccggtgcgtgctgccccggcggccgccgctgaaccttgcagccagggtggctttctccagcagagagaacagaccctgctggatgagcgtctccaggtggcggcgacaggaggctgttttcctggaggttagcgattctctaggaccccagcctgctagctgggatggccagcacacgggggctgcctgctgcctgagacaggcttgggagctgagtctgcctcacacagttcaacatctgaagatgagctggcccctgatggccaaggtgatgctctggcctggagcctgtggtcagaattgagcagggtgcgaaacagagccggcattcgagacccaaaaccgagatttctagaccaaaaaaaagaatatatttgtaaaccagagtttgtccagacacacaaaggaggagctgctgagccgctggagacaccaccaaatgaggcctcaagacacaggggatggtgccagcaggcgtggtgccagcaggcgtagtgccgggagtcactgaggagtgaggccgcgccctcctcccagtcctctgtcctcggaattcggattcggtgcaggcgtttattttcatttaaggagccaactgtgtgctgggaaagatgtgagcattgagaaaaaggaggaattgatgcctgtagatggaagagaaccagagaagtcggcgtcgcccaggagacggggttgggaaagccctgtgtcacgcaggcccctgcccggctcttcagccttctcctgggcaacattcacgaccttggctgtcacgcactgattttcaaacgtaccaaatgcgtgggctgggtggggtttccctttgtccttcagtgcttagaattatgcccaaactccgtccagaactccctgcagctgggaatggaggcaccactagggtaacacggtgctgccgccgcaccaaagccttcgggcctgcctgcctctgtgagtgcagcctctccttgtataacgtggcattcatttcctttccgtggttctgggtgtttgctggggactgacattgttggaaacagtagctcacccgaggtgccgagcacacaccaggcatcagtgaggcttcagcccgcagactccgtggccctggtgccacctggacagtgccaggcacaagcggaggggctgtcagctgctggaggtgggcggctttggctgtgcttaagcccagttcagagcagcctgcagcagagtgcccaagtcgcgcggctttgaccttgcaccccgacggtaggctccttctgttgtaggactttttaattcagctaaaaacagggtctttgtcacatgaccatgaaaaattaggctcccagacactttgaagggtgggaagggcagggtttattgggtgagaaggaaaaaacgggaaacagggcctccccgcaaagccggagtcctgctggtgcacttcccgcctcgcagattggatcccaggttctaccccagatcgggaggctgggctcctcctgctgcaaagggcgccaacttctgtggctccccccgttgtcccagtgtgcaggctggtgggagtttctctggggacccctttatacttggctatctcacttcctgccagagcacaagcccaccactccccacagggaagactggaggcgggcaacggtcctctgagccagaccagaagttcaggtgaggacacggttagtaagagccagtcaggtgaggacacggttagtaagagccagtcaggtgaggacacggttagtaagagccagtcaggtgaggacacggttagtaagagccaggcggtgtctctctgcaccacctggagctatgtctctggctgaggaaggcttgggggtccccaagacaccctcctggttgcccagaggccacacaggtgaccgcagccaaggccaggaggcagcccagcttgtgtccttggtgccacaacagacaatgaggcttatgcacccacagatccccagctgccctttcagtcaccaggatgtgttggaatccatcttgcgccctctgcatttttagcttccttttatggttccttctagaaaaaagccttttagagtcacaagggacttacttcctagtgctcgtgtttgggggcctggtggttaagtccacgttcccctcttctgttaaatctgtgattctgtaatagatccctcagtcaaggaagttcatagttaccattctagactgaaagacccccggactttggctgcaatgtggatcctggcgaccacacccatgtctcctccttaagtctgttacgaatcagagccctaccgagcttattctgaaactttagcactttcttcatataatctgacccagataaatttgtacaaacctgaccactgctgacaagtattggctgaatgcttccacatgtccagctcggcatcaggagctttgggggttttgagcaaaggcattaaccctgcggccagggcccctgggccctcattctgggtactcagtggctgccgtcaccccaagagcccagatgtgcctgctcctcagcaggtggtcaggcccctcccttcagtccctgcttttcttctgcttcctttgtgcctctccaagtccccaaggtattgacgtcggccatgataagatacgtcgtgaatatttattgtaaattaagactggcttgccgggcatggtggctcacttctgtaatcccagcactttgagaagccaaggtggatggatcacttgaggtcaggagtttgagaccagcctggccaacatggtgaaaccccgtctctactaaaaatacaaaaattagctgggcgtggtggcggatgcctgtaatcccagcgactcaggaggctgaggcaggagaatcgcttgaacccaggaggcagaggtggcagtgagccaagatcacaccactgcacttcagcctgggtgacagagcaagactccatctcaaaaaaaaaaaaaaaaaagactggctactggctgggcgtatgcccataatcccaacacttgaggaggccgaggcgggaggatcgctcgagcccaggaatttgagactaccccgggcaacacagtaagaccctgtctcaacaaaaaacaaaaaaaagtagccaggtgtggcggtgcgcgcctatgtccccagctacatgcagagttgaggcgggaggatcacttgagcaggaggtggaagctgcagtgagccatgatcacaccactctgcaccccagccagggcgacagaacaggacactgtctttaaaaaataaaaaaggggcccggcgcggtggctcacgcctgtaatcccagcactttgggaggccgaggcgggcagatcacaaggtcaggagatcaagaccatcctgtctaacacggtgaaaccccatctctactaaaaatacaaaaaattagctgggcatggtggcgggcacctgtagtcccagctactcaggaggctgaggcaggagaatggtgtgaacctgggaggcggagcttgcagtgagccaagattgcaccactgcactccagcctgggcgacagagcgagactccgtctcaaaaaaaataaataaataaataagggggaaaagatgctggctcctggatccactcttgtgtgtttcttttgacaggcattacgagattggacgaccaaatatttctgaacaggaaccccggcgtcccctctgtggtgaaattccaccccttcacgccgtgcatcgccgtagccgacaaggacagcatctggtatgcaccgcgctggtcaggcctcccttccggctgaccgacagccccagcgatgccctgttctcccccgatcaccactcctcttccttgaaaagcagatacaaggcactcaccccgaggcccttagcactgtttcctgagaaacggccctactcaccttctcctctttgaccgagccccacccacacctgccccgggcctggccctgtccttgtcactgaaggacagtccagagtcctgcctgcaggtcagaggggagtggcagggactccccagtgacacttgtaatagaggcgtacacaggggggccagcttgctgccctgcccgcagaagcaagcatgtgatagacaagcagtaagaagatgctaggtgccccaggagagaagtgagtttaactcacagcaaatatcgcccttagagatggagagagtacccacttcatgggggagggcagtgggagggggttccttttagagtttagagtttataaaatctctgtggttcacacctccatttctttttcctctttttaaaaattgtggtaaaacatacatagcctaaaatttgccattttaaccgttctgagtgcgcagccagtggcattcagcgtattcacattgttatgcaaccatcacccccattggtctccagaaccttctcatcacacaaaaccaaaacttggtccccatcagacaccagctccccattcctgcatccgcctgagccagtgtttcactttctgtctctctgaagtggcgcacgctaggagcctcataccagtggagtcacccgggatttggccctttgtgcctggcttattcggctcagcgcagtgtctttaaggttcctccaagctacagcacgtcagaatttccttttcatggctgagtaatattccactgtgtggatggaccacactttgtcttatcattcatctgttcatggacacctgggttgcctccaccttttgtctattgtgaataacactgctgtgaacattggtgtacaagtatctgttcaagttcctgctttctgttttttggggatacgcccagagtggaattgctggaccatatggtgatgctctgtttaattttcggaggaaccaccaggctgttttctgcaggaaatcctcttcccttcccacccgcacagcctgtggctccaatttcccacatccttgccagcactattattctctctttgtttgtttgtttggagacaaggtctcactttgttgtccaggctggtcttgaactcccaggctccaacagtcctcctgcttcagcctcccaagtagctaggatgacaggtgtgagccgccgtgcccggctgtggtgtgtggttttttgatagcagcccggtgggtttcaggaggtatctcactgtcatttgggtttgcagtttcctaatgacttttttattcctctcttcttcccttaagcttttgggactgggagaaaggggagaagctggattatttccacaatgggaaccctcggtacacgagggtcactgccatggagtatctgaacggccaggactgctcgcttctgctgacggccacaggtgagcggggtttgcacagccaggattggaagccagggtctggaggagtggcggggagggtgtgtgatcctgagatgtgtttgtacatctgtcttacagaaagccctgctcacacgcgagggccactgtcattcagaagtggggaggtttatgagggaaagggcttcagcagcagagacaggaaagcaaagatgaccccatccttgagggttccagggacttgtcttctcatctcagtcctctagcccttccagcaccaggaaaagcctctgacagcctctgtccttaaacccctgtgagagacccggtgggtcccacgtgacacccgagaatcagggaaggatgccccaagccacaacacgtgccaggtcctccccggccagggtctcctggcatcgctggctcatttgccagttgctgtccccactgggagctggcactcaccctcctccagtcccgtcctgcacctgaaaggacatcgttgaccatcatggtcgctgaccagtggttcattgccgtagtgggtctcactcaggttttggttttcttgggttttcggggggttttttggaggggtccgaaatgtcttagtttcatcttcactttggaacaatcgtttgtttccatgtcagttaccccacgttgacagtcattttcctttagcgctttgaaaacacgtgtccattgcctgttgctgatgagaagtcgctgtcagtcccactgcacttcctgtggagactagagagcgctgggcgggaggcaggcgggggaggccagcacggctgagagaagtgaaggccgacacccggatcccacccagcctgtccctgtcggccgcagcccctggacacctgagcctctgagagtgtcgagtcggttgtgctgacaagtgcgcagccctctcaacgcggttgcgggctcctggtgaggggcgtggccatggggacgtgtcctcgtgcagcccctcctccgagcgctgccccctcaggaccaagtagcatcaaccgatgtcgaaagcccgtctttgtccctgtagctgtcagacgtgaccgggaggagatgcatagtcggggcaggggccggtgggggcaagggaccagccaggctcagccagcggtttcggagagaccagatgtgagcatctcccaacaccagagggagagggcagttccttggctgagagagcgagcactggagcagggccagggtcctttgcagaacgggctccagacagcagtagaagggctccagctccaaaaccaggaacgtttggtgtatgcgatggaaagcagagagcgggacaggcaggtgggtggaggtgaggccgtcgtccaccagggcaatcagctggggcttgaagagcgcctgagggtcacgcaggaggggctggtgaggccagggggtgcggatgtggttcccggaaggctcagagtgcccgcatgctttccccacacccaggccgacctccctgcctgtctgctggaggatgcagagggccgtttcctccattctaagccctgaagagcagggcagtgcgtccctgcccacgtcttaggcggagagcccagacgtctgcattgtcccttcaagtcaaggctactctctctgtggagcacagagaggaatggggcggagggtgctggtgtcctctgtgaagctggcctttcgttctgctccctggcacaggctggctcaccagagggtaaaacgcagccccacccacccaaccgagcttcacccgcctgcctccctccagggaacccgatgccctggagctggagggaggaagggcagccccggctcccagggcagccaaacctcagagttgagctctgtggccagggtgggacaggattgtggtctcccatcccctgggctgcgactcctcctgctggctcgcccagatatggatctgaggacagagtccagtcggtgggcacccagagatctggaaccacgggtagtgagtcaggctggccgcccagggtcactgcagcacgtctgccaggaagggctcttaccaccacgcacagagcacaggccaggccatcgaggggcctggttcacatcctttcctctctccctccccagacgatggtgccatcagggtctggaagaattttgctgatttggaaaagaacccagagatggtgaccgcgtggcaggggctctcggacatgctgccaacgacgcgaggtgggtccgcccggctcctccccagagcagaatgtgttcccggggctgcggacgcactcggaattccaaggcccttctggggctgtctctaaacaggctgctccacctcagagtccccagaatcctaaagcaacagctccccgccaatgtccccgaaagcgtgagagccccaggtccctgagtgcactgcctggctggagtcccagccctgggcatggtctcagccactcgtgggtgcccctgtccccaaccttcatccttggcttgcagacatgtgctgcttgggacagcatcactgctggcagggcctaaagggcccgcatcacggggtccttctttggacctaaaattaggtctgctctttggacctaaatttaactcctccttgggggtcggggtgcacatggccatctggggcctcacgcgctcgctggcatgcctgggctggtgggacggagtggctgcagtgccggctctgggtacagttctgcgtgttgcctgcaccgctgcacggcctgggtgcggggcgaggcgcaggcccacaggtccttctggaaggactcaggcaggagttaggaggctcccggggtcaggcttctgggtctagatttccagaggcccctctgcagcaccaggcattcgcctctaggagtcatcgctcttcagcggatcctgcagcccttggcgatgctcagagtgaacgcgttaccccgccagcccccctctgccggctcctgccggtttgtgatttctgtgtcttcgtctgtggcctgtggatgtggccttacacctcgtggtcagccttccgtgtggggcctgccctggttctgccctaggttgcatggctctgtctccgcccttctgtctgagcacctgtcccgggagatgccaaccctcacgtgcctcgggacgtcatgggggcagctccagggtggacattgcctcgaacgttggatttttttttttaatgtagccatgttcttaagtttcatccagcaaaaaaaatcatccacaccccgcactccgtgggggccctttcctgttgcttctgtcctgatctctgggctctgcttcccctgcgaggcaaccctcttctggggtatgacagcttccctgggacagggcaggaaaagtgagccccagcccggggccctggtccaggaggggtcccgggagacagctggatggccagcctgggggtcaggccactcaccggccattgtgtgtctctccaaaagaccaattttggtgacactgtgtcatttgctagagaggaaagatcactgtttgataggctttccaggctgtttttctggggtcgctcagaggcagtggtgccatggaaggagctgggcttcagcacgggagcgcctggctgagccctggctctgccttgccctttctcttgtttgcttttgtgaaaacttccctccctgtccaaggctcggacctgccggaaatgcagtgctggaaggacacacccgtggctagccccggggtccatgagacccccctagaagcatccacatgtccatgcccagctggccccggggtccctgagaccccccggaagcatccacacgtccacacccggctggccccagggtccctgagaccccccagaagcatccacacgtccacacccggctgggcctggggtccctgacacccccagaagcatccacacatccacaccgggccacgctgcaggaaacaagacttggtggcctgtgctgccccacgggctctcagtctctccgggtcaggatggcagtgcccagcttacatatcaggaagcagcactgacgagaaaagcggccttctcggcccagaccctccagtgcttccttcagagtgggagcctgtgctgcacttcaggggtctcggggtcagagaacgaggctctcactgcgggggaaggcagcagaggcgtctcgccagacgtaagagctccaggccccagtccccgaaggctgtgccagctgtgggctggggcaccaggcacagctctgggctccctcaggttgcacaggacatgggaaacctgggtgtgggcagcaggcgggtgtgtcactgctgctgcggctttgctatgtgtccaggactggttcaaaccagttcactcggcatcacagaatctgaactgaaaaaggacttagggttcacctgactatacccctccatggcaggacgctcgggccgagggacagctgcccagagcctctggttcagatggacacctgaggcccagggtcgggctgtgccatgtcccccatgccggcatgtcactgtcctacccgggtacgtcggcctatgtgctggagacagggcctttacagaggtgattaaggtcaaaccaagtcaccagggtggccctaacccaatgtgcctcgtgtccttacaagaagaggccaccaggacacagacacacgtgcagggacaggtgggcgttcctgggacgccggctcggcactcacccaatgaggtcacggtgtcaagggagggcccgagttccagcaggttgctgggggatgtctcacgggcctgagggtaattatttgtcatcgattggagtcacactgcctaaatccagagccgtgaatgctgaccacagcacagccaccactcttcttgaaagtcacagtcaccaggacccagtgttggcatttgatagattaatggtattagcaggttggtttccctccgcggtattacatttaagggaataaacaactcacatgaacggccaagggctgaagacagaagtggtgctctccatcttcgtcaggtgctcacggagggcccacagcacatctgatctggtcaccacggggatccgtggagccgcagaggtttcatcctcccctggaactgaggagctcaggccctccgccagcttctgctgcagggagcctgcaggaggcccaaggcgtgacctccgcttgccccagcccccactcgcctctcccggacccgcttgcccagttgggcacacccagctcaggcacacgcaagccaggctccccacgtcacccctgagactggtgctttggaggctgtttcttgttttctggcatcttgaatgttctccatgtgctcgttctcaccttttccctctgtttgttctgctcgtgtcactgctgttcccagggcacctctctgttcttcccgacccaaggtgtcgcttcctggcagagtcaccaggaggatcgtgcctgggacgtggctgctgccccccaagtgaccatgcagtctagaagtgcagagcccagacccatgcatctctcccttctctttttcttttcttctttttttttttttttttttttttttttgaggtggagtctcgctctgttgcccaggctggagtgcagtggcgtgatcttggctcactgcaacctccgcctcccaggttcaagcgattctcctgcctcagcctcccaagtagctgggactagagggtcgcaccaccacgcctggctaatttttgtatttttagtagagatggggtttcaccatgttggccaggatggtctcgatctcctgacctcaggtgatcctcccaccttggcctcccacagtgctgggattacaggtgtgagccactgcacccagcctgtgcattttccaagttgtgcagccaccacctttatctagttccagaagattctcaccactccagaaggcggcctgctgcccattaaagcagtttcttcccatagattcttatttatctatttttgagacaggttcttgctgtcacccaggctggaatgcagtggcaccatcacggctcactgcagcctcgacctctcagggctcaggcagtcctcctacctcagcctcctgagtagctgggaccacaggcccatgccccacacccagctcccataagttcctcacttaaacagagagaaacttagaaaatgtctgtgccaagccaagccctctgtgcttgtggatctgccccaggtctcagagtggggcctcagggcctcctggcgcagcctccggatggccgtgcctccaggcaggacagcactgagccactaaaagggatgcaccaggaaccctgggcggtgtcctcctcggtcacccagacgccacttcccaagagcatgtccgggtgggcagcaagcattctttgtgattaatgtaggtaacagcatatcctgagggagggggctccagttctgtgtcctcaggctctgttggctgcacagctgcagcaggagctgggctcttctgggcagaaacggggaagtatgtgccctcccgcccggttgcacaccggccctcactgtgctcacaaggcctcccagcggaggagcagggctgcaagttgaaagcctgtgatccaccacggcgctcgtgcttctgacctgctgggacatttcttcctgcctgggttcaggtgtatcacagtagagggactacacttctttttttgtttgtttgtgtttgtttttgagatggggtcttgctctcactgcagcctcaaccacctgggctcaagcggtcatcccacctcagcctcccaactagctggaccacaggcgcacaccactgcaacggctaatcttttttcttttgagacggagtttcactcttgttgcccaggctggcgtacaatggcggatcttggctcactgcaacctccacctctcaggttcaagcaattctcctgcctcagcctcccaagtagttgggattacaggcacccactgccacacccagctattttgtgtatttttagtagagacggtgtttcactatgttggccaggctggtctcgaactcctgacctcaggtgatccacccgcctcagcctcccaaagtgctgggattacaggcgtgagccactgtgcccgggctacattggctaatcttttattatttgtaaagacaaggtcttgctatgttgcccaggctggtcttgaactcctgggcttaagcaatcctctgtctcggcctcccaaagtgctgggatcacaggtgtaaacacatctggcctgggactgcatttcaaaagtaaaataaagaatgtatgtatgccagcaattaacaactagaaaatgtaattataaaacatcatgggccaggcgtggtggctcacgcctgtaatcccagaagccgaggcagatggatcacctgaggtcaatagttcaagaccagcctgaccaacatggtgaaaccccatctctactaaaaatacaaaaattagctggacatggtggcaggtgcctgtaatcccagttactcaggaggctgaggcaggagaatcacttgaacctgggaggcggaggttgcagtgagccaagatcacaccactgcactccagcctgggcaaaagtgtgagactacatctcaaaaaaaaagaaagaaagaaagaaagaaatcatagacaacgggaataaaaactgcaagatacctaggaatgaatccaacaaatgcactttcttcacagatcaaagcataaactctaattgaagactataaaaggcacatgcagtgttcatggcaccatagccatggatgaaaagactcatcattgtggagattggcagttctcaaattaatctgtggatttattaatacacttttgattatattcccaggagagatttttataaaatgcagaccagccaaggcaatattgaagaggcgcagacggcattaagaagctgcaattgcagggcagccaggccaagaggcaccagggccctcagcgcagcagtgagcccagaagggccgcaagtggcagggtacctctgcgcactagggaaggagccatgttgctaaatggtgttgggacagctgatgccatatagaaaaggatgcagtgatacccctacctcacaccatgcacaaaacacatcacagtgagagacctaacctgtaaaagcctttcagagaaaaatcaagaggaaatcttcctaacagtgaggaacaaaaagacagattgaacaagagattgagggtaaagacatcaataggtttgactctacagacttcttcatgaccacaagaaaaatgtcacggttgtaatgtaagtggcagaataagaaaagatatttgcagtatctacgagttacagaatatatataaaaatatgtgcaactgtctgtcgtgaaaaaaaacggcaaacaccacacatcgataaggatttggggacattggcttgtgtgtgtcctgccgagagtgtagatggtcacccatttggggaatgaaatggccttccctggggagatcagagtcatgcaggatacatgactggcagttccgttctaggcgcttccttctccacccgcaaggacacgtgaagttgttgactgtgacatggttcacaaagccaggggcagctcaaatgacggggttagttgtacagtggaaggtaacgcaagattaaatgagttaaccagagctgtgtgtcttgggccagataaatcctcaaagcctaacattaaagaagcaagttgctagaaaataggccccattttgacactgaagaggttttttgaaatgtggaaggcatgttacgttgttgatgagcgtgcgtaagcaggaaaacctcagcagcccctgggaggcgccctcagcccaagggacagccctcccaggcaggcgcaggggcagacgatgcttttactgtgtctaaaattatgcttctctatgaaaaaaaaaaaaaagagcaaacaatggtaaaatgttagcaaagttagagctgagtggtgggtacaaggattactatggtgttcctttctgtatcttaaaatggttatcattacagttttagaactgaatctggttttaaatacaggccgtcacgtgaggtgggggttgctctgctctgtctaatccccacacaaagggcagcccttgccccattctctccgtccatcccttgctgacgccagccgtcgggagtcagccccttgctgtctgaaggctgccggcccgtggcccatgccgagctcctgtttgtctcagaagaaccggcttcctcaagctttgatagggccaaaaggaggaccctcatcttcaagccttaacagccttcctaaagtcacccagacctgccagttctgcccaggcgtccagacggcaggcatcttagacgtcgctgcaagggtctgctccagatggtgagcaccttagacagacgttgctggaaggcactgctctgaacggtgggcacctaacagacgttccgggaaggcactgctccggatgttgggcatcttagatgttcctggaaggcactgctctggacagtggacaccttagacagatgttcctggaaggctctgctccgatgttcctggaaggctctgctccgaacagtgggcaccttagacagacgttcctggaaggctctgctccgaacagtggacaccttagacagatgttcctggaaggctctgctccctctagcgatgcctggggcatagtcgagtcaggggaagactcagagttccagctcagaattgtcgccccagcctggacttgggagttccagctcagaattgtcaccccggcctggacttgggagttccagcttagaactgtcaccccggcctggacttgggagttccagcttagaattgtcaccccggcctggacttgggagttccagcttagaactgtcaccccggcctggacttgggagttccagcttagaattgtcaccccggcctggacttgggagttccagcttagaactgtcaccccggcctggacttgggagttccagcttagaattgtcaccccggcctggacttgggagttccagcttagaactgtcaccccagcctggacttgggagttccagctcagaattgtcatcccggcccggacttgggagttccagctcagaattgtcaccccagcctggacgtggggcacaccagggtccctagcgggagctcatatgaggcatatggacccaccagatgggctcgatggtggcaggggtaccttgtagctgctggccaaattgctgcccagagcaggccccaaagcctgcccaaggcaagggcccatggggtgatgccatgtcccactgtatctctccaggagctgggatggtggtggactgggagcaggagaccggcctcctcatgagctcaggagacgtgcggatcgtccggatctgggacacagaccgtgagatgaaggtgcaggtaaccatgcaggtgtcccccaagccctgggcctgtggggcagtgtgtgcagggctggtcctcgtcacagaacccagcaaagtgtgcggtgaggcctggccatcccaggggtggagtcagggcctgggaggacagtgccgggacaatgctgggaggagacgtgggctccctgaggcctctggatgaaggtgaactgcaacacccagccctgcgctgcagtatggctcaggctgcgccagctctgagtgtttgcaagtagtgtcttctctctgcaaattaaggaatgtcagaaatcagtagggtgaccaattgtaaattagaatgattaattatttggaggcgtttttttttttcttttgagatggggtctcactctgtcaccctgcgtcacccaggctggagtgcagtcgtgcaatcacagctcactgcagcctcaacctcctggtccaagtgatcctcccacctcaccccccccccccaccaccaagtagctgggactacaggcatgcacccacacgcctggctaatttttttaactttttgtagaaacaggggtctcagtatttgcccaagctggtctcgaattcctggctccggcaatcttcctgccttggcctcccaaagcactgggattataggtgtgagccgctacagaagacagaagatttttgtttctttttttttttttttttttttttgagacagagtcttgccttgtcgcccaggctggagtgcagtggcgcgatctcggctcactgcaagctccgcctcctgggttcatgccattcttctgcctcagcctcccgagtagctgggactacaagcgcccaccaccacgcccagctaattttttttttgtatttttagtggagacggcgtttcacgtgttagccagaatggtctctatctcctgacctcgtgatccgcccacctcagcctcccaaagtgctgggattacaggcgtgagccactgcgcccggccagaagcctctttgcttcttaaagcatctgctattttcagttttgacaaaaagcggagtacattggttttgcccaagacagcctggaaaagtggtagagacctaagcaggccgcgctcagcagaaatctaactgcattgacttcatttggagcagaggcgagaccacagatactgtgaggggcagcgcctgaggtggctttagagccagtattcccttcctctgggtccccagggagaggtgtggcacagaggccatacccagcctctctcccgggcaggccatctggtgtcaggagggatggctcagccctgctgccgtagagggcggtgtggagcaggcccagcagaggggaggcctgggcaccctcagctgctcgaagctgctgtggttgctctgggcagcagcagcccgagaacctggcccaggccttcccgtgtgggcagcctcccctctgacgtgaccgtggatccctcgaggcaccagcagctttcatggcaccttctttggggtgggggggtcttgcacctgtctggagctgtggctccacacgagacgtagccctcagggcacagcgtggacaccctgatcctcagggtctggtcaccagtgggggcttagaggcccaggtggcctgcggggcaggtgctgttcctgcagaggtgggtggaggcacagagcgcagcaggtgctcccagagccggctctgcccctcgcaggggtctggccccatcatccccacgcctgtgtttcctcctggagtgcacaacccagcaccgcccatcgtgcgtggaaagcgctctccctctcgtggcccttttcctcctgcgtccctggcaggtgccatcgcccccgcccccgcttctccagcacttagagcccccgagggagccagatgacccctcctggactcgtcccatagctcattagaagttctgagacgcagccagtgaggagtccttgccaaaatgtgctttgctttcctttttaggaaacagagagaggttggaagtttaattggcactgacagccagtccttcccagaggcgtttgcaggcctccgctcggggtggggctggcctctgcctcactggctgggtcccaggcgcctcagggcctcagggctgtccctccagggccaagggataagggcgtgactcattgtcctgccagcccctgcctctccctgggactcctgggctccccaggcctttgatgcttccctggatagagagaaaggcccctgcagccagggagggtgatccccacagccaggcaggcagcaagaggggtcctggcgctgcaggacagcagggagggtggctcggtgccccggtcttcaccgggctgcctgtgtttggctctaggacatccctacgggcgcagacagctgtgtgacgagtctgtcctgtgattcccaccgctcactcatcgtggctggcctcggtgacggctccatccgcgtctacgacagaaggatggcactcagcgaatggtaccttgaccctgtcctctccctccccgagtgctggcagggtaccttccaggtggtagggccgtgtcactgccatttggttgggtccaggtttctcagtgagatgcaaagcttccccaggagcctgcagtggcgtatttaggccagtcctgggctccccaaagccgccaggcccgtcccactgaggcccatcccacaaaggtctgccccacagaggtccaccccacagcctatggaggagcacaggggacaggccatgtgggatgagccagtggactggaggcagaggctgtcggggtgaggcagggccgcagccaggcacctgccacctctgagctcacctgaacagaatactgccactgcctgccacctcctgggtcatgcagcaagtgtctggggagggatgtctgagggcacacacgtgggcacagcagccctgggcactgcctccactgagcacccctgtgggcaggtgctgtccgcgtctggcagaggacagggtacacgcatgggcacagcagccctgggcactgcctccactgagcacccctgtgggcaggtgctgtccatgtctggcaggggacagggcacacgcgtgggcacagcagccccgggcactgcctctgctgagcacccccgtgggcaggtgctgtccgggcctagcaggggacagtccgtcttggcccacacggctcatgcagcagaagtaaatttcacccagcacagagcgaggattcccagaaggtccttgtgcctccagcttcatcagctttaggtctgggattctcattcctgaccctccagtctgcacagatcggggagacacaatgaggagttttgagggaagcaaagcaaagggtgggcagggcctgggagcgctgcgatggccgcctggcccccgtctctgggcagcttccatgtggctcagacagtcctccagcggcctgacggtgacctagggcccagccctgagccagcctggggaggacacagggggtctctgctggagcaggtcacctggagggggctctgaccctgcgtgagcactagcccctcgtggggagcggacgggcgagggcctgcggacccgctggcacaggcagacctgggcagctcccggtgagagccccgaagggtggggacgtccttcagggaagccccacgctgagcgtgccccctcccctacagccgcgtcatgacgtaccgggagcacacagcctgggtggtgaaggcctccctgcagaagcgtcccgacggccacatcgtgagtgtgaggtgaggagcgccgatatttagcagccgttctgctgtaaaaacattattttcccctccatttaaaatacgtccttggtatttaaacagctggaaggggatggcatttcgggcagtaattaactcctgccctggaactggccagaaagatcaggcgcagcccgtaggggcccaggggccacagctgctcccctgctgggggacacctgacctgcaggcgctttgggaactttcctgggctgccaactgcggagggttccggggggagttgggcagctgctctccctccacgggcaggggtggcagggtggcaggggcggcgcgtctgccaggcacgtggcagttgtctgcacataaattcagttctgcctcttggtaaatacagcaccaagagcagggaatatttatttgcctattaaaggaagagcaagatgtaatttatgaatgcaaagccagcatttcttcaaagagatgctcttttcccccttgtttgtgatataaaaaccaaacataactcttgggatggacgcctgctgggggtggaaggcaggagccacggggcctcaaaagggccaggccatccctctctcgggccacagcctgccatccaggctctgtctcccgggactgcaggccccggttgcatgaaatctaatctctagctggaaatgaaaccaggagctcacagcctcctcccgcatctgtgctcatggtcatttctctaggccagaaagctccgcgccttttctggctctgagagagcttgtgggggacagccttggccctgagaccagtatgggtgcatgtctgggccccacctgggcagccctcactggggacgctgagcatccaggcagctttttccttgagcagtgtgtgtgcaaacaggtgtgcgaccccacacacctggttccaccgtccccctggccaggcccctcatggggcctccgggaggaggtgtcactgtgaccctctcttggcagcgtcaatggagatgtgcgcatctttgatccccggatgcctgagtcggtaaatgtgcttcagatcgtgaaggggctgacggccctggacatccacccccaggcggacctgatcgcatggtaggcgccacccacctccctggcctgcaccgctcacccgcctcgggcctctgtgcaaacgggaggctcttgtgttcctgcccccaggagctgaaggagggcaggggaggatttcactgctgtggggacataaaaacaaaagatgtctgcccaccacatcctcccaggataaactctcagggccctgccaggcccgagtcctcagtgagagtgaccagagggtcacacctgccccgagccagcctgtccccgtggtctagccggcctgtccccgcggtctcggcatctgcgcccatcttccatcctcaaagaagagggcagtgatgccgggaccctttctctccccacagtggctccgtcaatcagttcaccgccatctacaacagcagcggagagctcatcaacaacatcaagtactacgacggcttcatgggccagcgggtcggcgccatcagctgcctggccttccacccgcactgggtcagtgtggcggtgggtgggggtcgggggtcgggggctggggtagagggatgggaggcaaggggacaaggcagcaggggtcctgcctggctaccccacaccacagtggggcccattggctgcctgagggagggacttgcctgggtcccaggatctctagggcccctgccccaccctgcactcgccccggaagcagagccccagtcccgtcactccgggaggaattgacacacagtggctggggcaaagctcctgccctcagaccctgcactaaagccatccctggggacctccaggagagtcgctcggggtgtccatccctgtgcggccctcaccccgtcccctgtgcggccctcaccccgtcccctctgcggccctcaccccgtcccctctgcggccctcaccccgtcccctgtgcggccctcaccccgtcccctgtgcggccctcaccccgtcccctctgcggccctcaccccgtcccctctgcggccctcaccccgtcccctgtgcggccctcaccccgtcccctgtgcggccctcaccccgtcccctctgcggccctcaccccgtcccctctgcgtccctcaccccgtcccctctgcgtccctcaccccgtcccctgtgcggccctcaccccgtcccctgtgcggccctcaccccgtcccctctgcggccctcaccccgtcccctctgcggccctcaccccgtcccctctgcggccctcaccccgtcccctctgcggccctcaccccgtccgctgtgcggccgagtcctcaccctgtcccctgtgcggccgggccccacctgcacggctctctggccttggttgcagcctccccacgtggcttcaggccgttgtttttagattaggattctgcccacctgccgccttgtgttgtgaggctccaggcatgtagctctgctgacacgtgtgacattggatcccagagctgccccgtggggcagtcctgaaaaaaccacgcagggcccggggcagcgccacgcccctcacggagtgcaccatgcatgggccctgcagaggactggtgggaccggcccggcatttccgggcctgaggtgggcgtgggggttcctgagaccccggcaggagctgcctaaggatgcgggttggcctgcgcccccccgccccccgcagtgtctgcccgcacctgaacccctgctcaccccttctctctccttgcagcctcacctggccgtgggaagcaacgactactacatctccgtgtactcggtggagaagcgtgtcagatagcggcgtgacccgggcccaccaggccacggccgcctgctgtacatagtgaagctgtcactcgccggggcacggggcgtcggctgctgcggccccgcagtgtgaacgttggctgctgccttagctgctgatgacggcaggagggccctgctactcgcttttgtctgtcttcgctgtcgtgtctggaatgtcagggaaggggagggctcgggttgacggtggcttcccactgagcaccagcatccaggtgcacccccgcggccacggcgcctctgtccctctcctgttctgtgtttctctgagacgctgaaaggggaaacacctcactttatttccatgtaatcagagcattagctgcagaaaaaccccccgacagagccctggcggagaggcaggcgctggggctcctacgggtccctggggcagctgtccccatcaggccaagagcgagcgagaggcgctgccccagccaggcccaccacctctcacagtcagtgcacgcaagcagggacatttcctagccagctgggggacactggaaattcgggaaaccaagagagaggaagaaggagacgcccctccaactggcgggtgtgaaggaagccgcccaggggtccgggctgtccttggccgctggcagcatcactgagcaggaagcgcacagcccaccctccccgcacctccaggtctctggactccagttttggcccctctcacacagagctgtcagcaggggccgctgtggcggtgcacaggggaggcaggtccttggcgaggtagcccctgccttaatccacggggctcctttccctccgaagggctgctcttccccacaggcgcggggacagcagcccgacctgtggtctccatgcctgtgccctcacacaggtgtagcacacgcatgtgcagatggcaccacggccggcacctgggggcacacacatgcaggcggcgtggtctccctgctctgtccccacacgttcctcacatacaggcaagaggcactgccgggtcccggacggctccgggtgacaccagccccgtctccagccttgagccgcccatgctgatgcgacctcggctgacagctgggcctgtggtgcagacaggagctgtgtggacagtcccgcccaggaggggccgcagggcgtgtatgagcagttttgcaaacagaacacaaccacaatgatggtattttgaaaagtgttctttccgtgttcgtcgggaatcaggattattgagaggtgaaggagccaggtggcttcattctggcggtgagaggcccacgaccacgggagtgagagctggtgtggcgaggcccggctctcctgcggtgtggctggtggcctgccgtggccaagagcatcttctgggtggatggaaccctgcctggtcacatttggccagagacacacctggccctcagggggctgagctggagactgagctggggctggccgggacgtgacaaggcaggacagaggcggcccctccgctgctcctttttggaatgcgagctcccaccagaagaaggttccggcacgaatcccatccccacgtctgggccgagaaagcagcccgggtccggaaggtgtagagagtcccggcctcactcagctcacagggcgtgccaggcggcaacaccagaatcttccagaagcccagctccacccgcacacgcagcttcccatccagtccttcaactcaattcttacccaacacgcgtttctgtttgttttgagacaaaatcaccacctgtcaaaaggcaggtggctccagaggggtcaagacccccccccgcccccgctccaccctggagcccacccccatgggcaccgcgtgccgcctgcacgtgggctgtcttcacaggtctgatgtgaaaattcaatcacgacgttaaccggctcgagagagcgccggcctagaggctcattatctatttattttaccaaacgcgaattgagacggactttgacaaaacacgaaatggtaatgtgaagctaagagcagagagtgaccaacagtaaacaacacgcgcagactccgcggctggcggctgtgtctttaaggaaactgcccaccccacctcaggggggcatcggtcagagcagagctctggggggtggggggacgttgcccgggtcccccctgctgtccccagggccaccagcagctctgcgtcccgggtgctctccaggcaggcactgtggccacagggggcctggcacgtcgagtgtgcaaaggtctcggtccttttctcccaggcagtgcccccagccctgtggcgcagaccccacatcagggagcgtactgtgtggcaagagccatcttgtgacgtaggccagacacgtgtctttctctttaaaatgacggttatcctctcacggttagaggccccattcaagtctgcattgaaatctgggccacgtcagagttcctgggggagaagccgcttccccgctcctccccacttctggaggcccccactctccttggctcgtggccccttcctccagttcagggcctctgacccacgcccaccgtcaccacttctcatgcaggccagaagtgtttccaggcctaggggccgtacccacctcgggctgtgtgggtccttagccctaatcacatctgcacatccctctggccaactctttttgggtttgctttttgttttgagatggaatcgcacgctgtcacccaggctggagtgcagtggcacgatcttggctcacctcaacctccacctcctgggttcaagcgattctcctgtctcagcctctcaagtaactgggattacaggtctgtaccaccacacccagctaatttttatatttttggtggagacggggtttcgccatgttggccaggctggtttcgaacttttgacctcaggtgatccacctgcctcagcctcccagcgtgagccaccacgcctgtccccgtctggccaattcttgaaaggctcccgtttccagatcacactctgctctgcaggtcatggcctgtcccttgaggtttttcccaagcagcaaggtccgtgcagggattgggagccagggggaatgttgtggaagccacagcagaggcaacgggcctgggcatggtcctgcggggcgagtgggaggcaagggtccgtggggatggtcatgtcagccacactgcaccacctcaggggcctgacttctggagagcttgggaacaggctcttgtccccccggcccctctcacctgccgaccagaaattgggtctcgggcactgagtagcttgcccaaagccctgcctgttgggtggtggcagggactggggtcctaaccccaccccaaggccatgtgcggagacctttactccaccacttgggctggggggtgtgttggggctgggggagccacgcactcgggacctacaggtgctgcttgtgcaagccccgccccgccctagagcaggcctgcaggagtggcagctcgggactcggatgcaccagggcgatatgtggagcaaccagccccgctgcgcacacagagggggcgcctgctacccgctgggcccccacccaccacggcctcatcaccagggctcgtggctccttgaggacgtcccctctcactcagtgctgcactgaatggcccttcggggcttccctcgtgttcatgtcattcctttttccaggatagattctggcacccactgcagcctgggccctcctcactgagcccggctcgcctgcctccctcctccactttttttttttttttttgacagggtctcactgtcacccaggctggagtgcaggggtgtgatcatggccactgcagctttgacctaggctcaagcaatcctcccacctcagcctcctgagtagctgggaccacaggcgtgcaccactacactcggctgatttttgtttactttttgtagagacaggactcagtctcactatgtggctcaggctggctttgaagactcggtctcactttgttgcccaggctggcttcgaactcctggattcaggggatcctgctgcctcggcttcccaaagctctgggattgcaggcgtgagccccacgctggcccctcctccacttttaaggaccttgtgattacactgggccccccgggatgctccagggtcaccaccctagtttaaagtcagctgatccaaccttatttcatctgcaacctggatcccccgagccaggtagtcacaggctcccactaggatgtggacatcgatagggaacactatgctgccaaccaacccctgtctacaagccaaagagcatcccaccaggtagagcccacgaacactcaggggtcttgggcaggaggtgggtggacacagggcgggaaggagatgctcagtggggttgggggaagcaccggccgcgatgggcctcccagatctcagggccaaggcatgggaagctggcaccatgtccgggtccttggggctgtcggtaaacaagtggatcccccatgacacagcagctgctcccaagccccagccggggccggaacacagggcacgttgccatggaatcctggaatcctgcgctgaattgcagtttgtttcaggcaaggacgcccggcactcacgcagctgtgccaggcgggctcctgttgagagagtcatatttttcccattagcaccagtttttctgtcaccgagatgagtacaaatcgagttcttgtaaacatggggatgggcacgctgtagaagccagcctcaggggaggccagggctgagccaggcccacacctgcccctgccactgccagaccccgtgtggttgtggtgaaggggccaggcctggtgatgccatgtggaggaatgctcagccttctggcgaggggccggtgagggccaggggtggccatgggggctcctgctcagcatggctctgctgggtgagactgcaggcacctgccagatgggcagctgtggcctccaacacacgtctgtgcctggcccccttccaggagtcttggcggatagccctcgggaggcggcagagcagttggcctctgggggtctgtgtctcagactcagttaccgggtggtccggagcccacacgtccccagacaggacagagcctcagagtcaggcacagaccaggaaggaacccttgaaggacacagggcgggcggggaggccagagtgggggccgagcaggacctcccacatccgcctgcggaagccccagtgcccggaacccctgcacccgggcctgcggctgtatttggagacagggcctttgcacgggtgagtatggtgaaatgaggtcaccagggtggccccaatgcagtaggactggtgtccttataagaaggaagattaggacacagctgtgcacagagggacggccacacgaggacacagcctacctgccagggagagtggtcccggaagaagatagccaagaggcccctctgtctccaagtccagcctccagacagggcgggtggagagggaatacaggcctgccgctcaggctgccgggcccacggtggtttgcttggtggccctgggacactggcgccaccatggcacctccaagccccagcctgtccctcactttaatgtggggacagttactgcaggcatgagtgctgtgagcaccaaacaagaccacagaagcttccagaacagcactggcaccagggaagcacccaatggacactgtccgaggtcacctgaggacttcacaactgcgggtgccacagggcttgggagctgggaagaacacagctctttgccacagctcagccgatgtcaagtcccagggctgcacggtacccgcctggaccatcagaggagagcagaccctgagctgggcctggtcacctggtgccacccagctgaggccatgtcctgtcggtggctcctgagctggaggaggaagagcccaaccacatgggccctgcctgtccttccccctcctccaccttgggaaagaacctcactgcagctgttgcggcggcttccctgcccatcccatcctccctccggtgcccaccccgtccgcctgactgccgcctcctctacataatgagctagagggtccctcctcctgagctccacagtccctgcgctggccctgccgtcccaggagcaggagcagccacagggctcctggggctctgaggctccatccgctgttgtgtgacccaggcacagtgtccacggaacacaggacgagagttacacacccagccccgccacaccactgtgaggacagagaaggcatggcgtgacctgccacctggtggagggctgcgaccatggagggtgctggatgcacctaccctgccctgctgcctggaagggggtctctgctccccagggccgggggaccatgagttcacctctgtcatcagtgtcagcatgacaaaccccactggtgccgctcacagcaggatcccacatcccaggccagccccctctgccatgccacctacctcacagccagaggtgggaacagcaactctggggagaactgagggtgctgtggccaccgggtccctgaggctcacggaggagagtgaggcgaggagaaccatggagctgggccctgccttgggaaccaagcactcgccctttgcagctgcagagccgtcctgatgggcaggcgggggcggggtcgctgtgtagctgtgcagagagcgctccgaatgggggtctgtcaccagctcccaagctcgtgggttctctcaagattcttgtggcacatgattcattgcctttcttaacagcatcgctgaaaggagaaaaggccctttggaaattgattgcagtccctggatgtgtctcttggagcacatgtccctcggttcccacttggcaaaccaggcttcatgtccccaagacagggccaggcagcccatgcgctccaccccctcccccgccagcctgcacatcctcccccatcgtccatgcagccccccagacgcccgctgtccccggccctgggtcctgacgtggcgggaaaggcagttcaggaccccccatctcccacctccctatccgaaacccagccctcactccccagaaggccatcactgcagcgtcctccaaacagcctgtggccccacaggcatgctctgagtttgcttccaggggccaggaagtgaggagcccccagtgctgaggccagggacactcatgcagggctcatggccaccagcgacagccaccaaggtcactgcccaaggctgcttgagccatcctgccaggtggcctcctgggcccagaaggctgatgtcacccacggctcagcatcggagggcagatgccatctgatgaggtcagaagaactgcccagaccccaggacccccactcagatccccacagcctggtgaggtacagaaccacagccgcatctgcagggggaggcgcaggagtactcagagctgtgggttcccctctggcctccccttggaggctctcccggctgccctccagggtcatccaccatccaccgcaggcgagctggaggggtggatgggaaggctttgcctgagggtgtaagcccccagggccctccagggaggacaagctgcgcggccgggaagctccgcagcctccaacccagggctggcaggagctgggggctgggggctccccacatggggtcccaggctcacctcccagcagggggaggcccagagagctgcccgcacaccctcaccaactgctccccagtcctggcccctgcctggctcaccgtggtcagtttgcccccacagagaaccagcccccaactgccagctgcttccaccttcagcagctgctgggggccaaccaggttccaccctgtagccaggggctcctccaaacccagcgatgggggagccagccctgaaagcaccagccccagggcagcacagggcctgtcacaggcccccagcaagcagcccgggatccaaggtgccagggagtccaagagcaaggcacactgggtttaccaaccacaaccccctccatgccctctgtgttagaaaaagaaagaagaaaaggcagcaaactcagactgtggagcgggagcagccaccacctgcatggagcagaggcccaggtgggcatggggatctggaccagcagagccttcctgggctgcgcaccccatccacgtgggagacaagagcttaagggctcccagaaaggctcccaaccatagcagcaaggaggggctggatgcaggagagccacagagtttgtcgctggtacagtggcatgacctgccttgcaggaggaggtgcctgtgggcggtaacacagccgcccccatcttcatactctgagcccagcttctcccctaactggaagacccagatgaggcactgctgtcaacccaactggctatgaaagccctgaccacgtgcaggatgcccatcctcacagcctgtaaagggaggagaccgtgccgggtgcagtggctcatgcctgtaatcccagcactttgggaggccgaggcaggcggatcccgaggtcaggagatagagaccatcctggctaacacggtgaaatcccatctctactaaaaatacaaaaaaaaaaaaaaattagccgggcatggtggcgggcacctgtagtcccagctactcaggagactgaggcaggagaatggtgtgaacccaggaggtggagcttgcagtgaaccgagatcgcgccgctgcactccagcctgggcgacagagcaagactctgtctcaaaaaaaaaaaaaagggaggagactgaccacccccaggctctgcagggaaggtgacagaggccaacaaccacaatcaaaggcaaagtgggacccacatgggtggttttttgggtttttttatttttttgagacggagtctcactctgtcgcccaggttggagtgcagtggcgcgacctccgctcactgcaagctccactcccgggttcacgccattctcctgcctcagcttcctgagtagctgggactacaggcgcccgccaccatgcccggcaattttttttttttttttttttgtatttttagtagagacggggtttcaccgtgttagccaggatggtctcgatctcctgacctcgtgatccgcccgccttggcctcccaaagtgctgggattacaggcgtgagccaccgcgccgggccttttttttttttttttttttttttttttttttgagatggagtctcactgtcacccaggctggagtgcagtggcgcaatctcatctcactgcaacctccgccttgcaagttcaagcgattcttgtgcctccacctcccgagtagctaggattacaggcgtgcgccaccatgcctagctaatttttgtatttttcgtaaagacgggattttgccatgttggccaggctggtctcgaactcatgacctcatgatccacccacctcagcctcccaaagtgctgagattacaggcgtgagccaccacgcctggccacgggtttgtttttgttttacttttaaaaactttttggtctgggagaaaaatgacacactagcaatgaacaatctgaaaaggaaattaagaaaccaattctatttacaataggatgcaaaagaataaaatatctagaaacaaatttgacaaaggaaatgaaagactttgacactgaaaactacaaaacattgctgaaagtaagaggctctaaagatggaaagaaatcccacgttcatggattggatgacctaatattgttaagttagcaatactccccacaatgatctacagattcaaggcaatctctatcaaaattccgatggcctttttcacagaaatagaaaaaccaggctaggtatagtggctcacacctgtaatcccgacactttgggaggcggaggcaggtggattgcttgagcctaggaattcaagaccagcctggacaacataacccccattctacaaaaaatacaaaaattagccaggcatgatggcgtagtagtcccagctacttgggaggctaaggcaggaggatcacttgtacccgagaggttaatactgcagtgagccgtcgtcacaccactgcactccagcctgggtgacagaatgagaccctgtctccaaaaataaaaagaaaaaagaaaaaccaatcctcaacttcaaggggcctcagagagccagaacgatattgtaaaagaattataatatcataaaataatattgtaaaataattttcttcttgcaaaagaaaaaaattagccaggtatagtggcttgtgcctgtagtcccagctactgaggaggctgaggtgggaggatctcttgagcccgggaagggagtccagcctgggcaacataggagacgccatctctaaaaagtaaagaagaaatagtgttggtggggggaggaagaaattagaggattcacatttctcaatctcaaaacttactacaaaactatgtggtactggcatagaatagacgtacggagcaatagaataaaatagaaagcccagaaataaacccgaagatctaatatgactgatcgatttttgcaagggtgacaagaccattcagtggataaagggtaaagaatggcctttttaacaaatgatgcgggggcagttggagatttacatgccaaaagcaatgacgctggactcttacctcataccatgtactgaaaactaattcaaagtggatcaatgacctaaatacatgaaataaaattataaaacagctagaaaaaaacatagaagtcaattttaatgaccctgggtttggcaatggattcttagatttgacaccaaaagcacatgcaacaaaagaaaaaatagataaattggacttcataaaaatgaaaaacttgtgcatcagaagacattatcctgccaggcacagtggctcaggcctgtaatcctagatctttgggaggctgaggcaggaggattgcctgagcccaggagttcaagattcaagaccagcctgggcaacatagcaagaccttgtctctacaaattaaaaaaaaaaatagctggttgtagcgtcacgtgcctgtggtcccagctacttggaaggctgaggcaggagaatcacttgagcctgggaggttgaggctgcagtgagctatgatcacaccactgcactccaacctgggtgacagagccagacccctgtctcaaaaaagaatgtgaaaagacaacctacagaaatggattaaactatttgcaaataatgtatgtgataagggtttaatatccagaacatataaggaattcttacaactcaacgacaaaaagtcaaacaacccaggccaggcgcaggagttcacacctgtaattccaacattttgagaggccaaggcaggcggatcacttgaggccaggagtgcaagaccagcctggccaacatggtgaaaccccgtctctactaaaaacacaaaaattagccaggtgtggtggtggacgcctgtcatcccaactactcaagaggctgaggcaggagaatcgctggaactcaggaggtggaggctgtagtgagccaagattgtgccactgcactccagcctgggtgatagagcaagtctccatctcaaaaataataataataataataagccaggcacggtggctcatgcctgtaatcccagcattttgggaggccgaggcaggcagatcacaaggtcaagagattgagaccatgatggccaacatggtgaaacctcatctctactaaaaatacaaacattagctgggcatggtggtgcgcacctgtagtcccagctactcgggaagctgaagcaggagaatcacttgaaccagggaggtggaggttacagtgagccgagatcgtgccactgtactccagcctggtgacagagtgagactctgtctccaaaaaaataaaaataaaaaatacaaataaaaaaattttaaaaagacaagcaacctaattttaaaatggtcagaggatttaaataccttctccaaagcaggtgaacaaatggccaataagcacatgaaaagatgctcattaccagtcattagggaaatggacatgaaaactacaatgagattccacttcacaccttctaggatggcttcaatttagaaagaaaaccagcttttggcaactcccttcagttgtcccgaaccctggttcatctgacaccagctgcttcaccatgctctgaagttccaccccaacaagagcaaagtcgtacacctgaggtgcagcgggggcaaagtcggtgccacgtctgcactggcccccgagaccggccccctgggtctgtctccaaaaaaggctggtgatgacattgccaaggcaaccggtgactggtggtctgaggattacagcgaaactgaccattcagaacagacaggcccagactgaggtggtgccttctgcctctgccctgatcatcaacgccctcaaggaactgccaggagacagaaagaaacagaaaaacatcaaacacagtggaaatatcacttttgatgagattgtcaacattgctccacagatgtggcactgatctttagccagagaactctctggaaccattaaaaagatcctggggactgcccagtctctgggctgcaatgctgatggcctccatcctcatgacatcatagatgacatcaacaatggtgccggggaatgcccagctagttaagaagcacaaaggaaaatatttcaataaaggatcatttgacaattaaaaaaaaaaaaaaagaaaaccagaaagtcagaagggttggtgaagatgtggacaaatcgaaaccttcccgcattgctggtgaaaatggaaaatggtgcagccactggggaaaatcgttcggcggttcctcaagaagttaagcacgggatcagcgttggacccagcaattccactcccagatatatacccaagagaaatgaaaacatgtccatgcagaaatttgtacaggaatatttataggacattattcataatggccaaaaggcagaaacaacaaaaggtccaacaatgaatgaatggataaacatgatgcagtatattcataccatggaatattacgcagccttgaaaaggaagcactgaagctacaacgaggatgcctcctgcaaacacacggaatgaaagaggccggattccagaggccatattgtgcaattccttttatatgacatatctggaataggtaaaaccagcccaactacagaaaggagactgatggcaccaggggtggggggagaggaggaatgaggggtgccacttggtatttttcttttcttttcttttttttctttttttgagacggagttttgctgtcattgcccaggctggagtgcaatggcgtgatctcagctcaccgcaactaattttgtattcttagtagagacggagtttctccatgttggtcaggctggtctcaaactcccgacctcaggtgatctgcctgcctcagcctcccagagtgctgggattacaggcatgagccacctagcccagcccttactgagtatttttctggggtgattaaaatgttttgacaccagatagagaaggtggttgtacaacattgtgaatacactgaatgccactgaaatgtacactttaaaatggttaacggggctaggcgcagtggctcacacctgtaatcacagcactttgggaggccaaggtgagcggatcacctgaggtcaggagttcaagaccagcttggtcaacatgccgtctcagctaaaaatacaaaaattagccagatgtggtggtgcatacctgtcatcccagctactcgggaggctgagacaagagaatcacttgaacctgggaggcagaggttgcagtgagccaaaattgcaccactgcactccagcctgggcaacagagcaagactctgtctcaataaataaataaataataaaataaaattttattttattttgtggtggcacagactgtagtcctagctacacgggaggccgaggtgggaggattgcctgggcccaggagttggaggctgcagtgagctatagttgccaccgcaccccagcctgcgtgacagaatgagaccctgtctctaaaaaataaaaataaaataaactagttaattgcaggttatatgaattccacttccattctttttcattgacaaaaatacaaactgacgccagagaatgcggctccggtcatgcctttggtccctccaggttcaagcgagaggatttgctgtgagaaacagaagtctcttaagagtgttaagagtgcaacctgagagggagggtgcccactgttgtggtctgaacatcgtgtccctccaaaacccctgttggcaccgaatccccagtctagcgtattaagaggtggggcccttccgggtaattgggtcatgagggcgcctcccctgtgagtgggattaaggcctgtgtaagaggcttcacacctcagctcccttttgctgtcctgcctcccgccatggggggacacagagctcaaggcgccatcgtggaagcagagagccgccctccccaggcacgggaatccagcaccttgaccttggacttctcagcctccagaactgcaagaaagaaatgtccattgttcataaattacccagtctccgaattctgttacagcagcatgaacagactaagacccaagaactcgccaaggaccgtaaggggcccggagtcgtgagacacaaattcaggcctggaacagcccagagaaacaggcggacatcaggcagccccagggacccgctgctctcatggtcacgaggctagcagcccggcctccagctctgtaatcccctcatctctgggggaagtcacctggaggggcccctgtggccaggactgaggcctcctgcccacagccactcagatgagcatggaggcgactctggcagcctcccaggcttgagatgaacccggccagcagctgagctgcagaattctgactccaggggcagcctgtgccacacacattcatcgtctatcacacgcgagaagtgacccaaggactcagcagctgaaagcagccgacatcatcccacacactcccaggccaggagaccggaagcggctcagcaggaagccgggctcaggtctcccgggggtggccatccagctgtcagccaagatggaggccaccgtgccattaatgacccaatctcaaaagtgacctgccatcactctcctctgcccttggtcactcagaccaacccagcgcagtgtgtgtggggacgcaaggaccgtttgagggcctgtggcagcctcctgtgtccgtagctgatgtgagctcatcccacctccccgggcttcttcctgccccaagcctggccttctcacccccttcctggctctcttcaagccatcccacccagcatccttcctgaccttcagaccacaggcatagctcacccaaaacacaccctccaggcctcagtggcccccctcctgggcgctcatgtcccctcaggcgcgtgagcctcccagccacctgattccggccaccaccatcactcccggggggccgctgcagctgcctgcctggcagttccagctccacccagcacaggccgctttactcctccctgcctcagtttctcccgtggaatgcagacggtcccccatcctcctggaaggctggctgtgtgggagctggggcagtagtgtgtgtgcagcctgtgacccctgggtcggccgatgtcatctcccaagtggcgccacgtctgcccaggggcttaggccaaaggctgacctcgccttcatgccccttcccctcagggccgctcctgcccatccagcagctctcaccgggttgacccgtggccttcaagcctgtttcccaccgcgaccccttctccccagggggagcagccaggatgaaaacccaagtgaggtcagtccctcctgggcaagggccaagcgcttccggctgtccgagaacaggggcggaccagccccagggctgccatgccccacccaccatccagtcctggcactgcactgtcaccccgctgtccttctatctggggttcaggctcctgagatcagatgccacatcctcaactacccacccaacatccctccagcccagcaccacctccattcccctgtgtcccttgtcatatgcaaactccatgacaaagggactgcagttctcagagcagggcctgcccatggtaggcgctgaaggaatgaatgaatatgaatgagtgtatgagtgagtgagtgagtgagcgaatgagtgggtgaaaaagttaatgagcaagtgtatgaatgggtgggtgtgtgagtgggtgggtgagtgggtgggtgaatgggcggatgagtcaaagaatgagtcagtgaatgagtgtgtgagtgagtgtgtgtgtgtgagtgtgtgtgtgaatgagtgggtgaatgaatgagtgtgtgagtgaatgagtgggtgaatgagaggatgaatgaatgaatgagtgaaggagtgggtgactgagtgaatgagtgagggagtgggtgagtgaatgaatgaatgagggagggagggagtgaatgagtgagtcagtgagggacagagagacggagtgagggagttaaagagtgggtgaatgagtcaatgagtgagagaatgaatgagtaaatgagtgagccagtgagggacggagggagtgagttaatgagcaggtgaatgaatgagtgaatgaggaagtgagtgaataagcgggtgaatgaatgaatgagggaggaaatgaatgcgcaggtgaatgaatgaatgaatgagtgaagagggagggagggagcaggtgaataaatggatgagtgaatgagtgaggtagtgacttcatcaagccccgcaggtcccgcagccacagggcctcccactccccgtgcccccgcccccgcgcccccgcgggtttccgggaccccagtctctgctgccctccgcgcaggagcctgcacagggtaggggcccgcgaggaccccggggcggcctgccgaggtctgggggcctcccttaggggtctgcgggtctctcccccaggggtgtggggtcctgcctcctccgggctgaggtcctcccaccggggtccggggtcccgcctgcggggtccggggtctctcccaccggggtccggggtcccgcctgcggggtccggggtctctcccaccggggtctgggggccgccccagctgcgagggccgccggcttcccctgtcctgcagcgccaccgcgtggccgccgcggccgctgctccttcccctggcgcgggggtcgccgctgccagccggggcgggacaggctgctgggacgtcagccccgaggccccgcgccaccccttcctgccccatttctaccgtagctctcaagcacccaaaagatgtcttcgcccttaaccccctgcagcccagcgcccccactccacgggtctctgagggtccccagcaagcagggtcttccctctgggccacccggccctcctctgggagcagcccacttctccccggcgctgccgcagcccctccgaggacaccttctcttccctaggccgcccattgccgcgccccagggagtgtctgcagccacgggtccctccaaccccgcacttgtgtccagcaccagcactttctgggctctcgcccattccttgaggatttgcttcttttgacttgctccagaatgttcgtcgggctcatcattttctctgctccctgagtcaccgctgcttagtctgaccctgaagatcccaccaggagcgtgggagcccctgcctggacactcccccggcccatggagaaggtggcagctctcccacatccgctgggccccaccgacgcggggcacctgcaaggaggggtgcagcccccagttcatgatctcagggtctcctggcccaagccaggcgtcagcacgcagcccaggcaagtcacctgcaacacggcaaaaggccctttccctccctgcatgcctctcggccccaccttccctccctccccactaggcatgggctcaggtgtgggtgtgactcctgggccaggcagccgtgggtcttcacccaccatggctgcagctgaccaggctgggactggaaggcggagaaggagggctgccctctccacccaacggccctccagccctaggaggaagctggctgcgtggtcagggaagagatgagggacagagagtggggagggcttcctccactggtgactgcattggtcagttcctgcacccagaaggcctagggccacctctgtggagtggagccaccagcacgacccccagaggctggtggacacctgggtggagggaccagctggatgatgatgtcatgtccacgtcattggtgcctcacaagaaccaccttttctcaccggctgcctctccattcgtgtgtcatttgaaggccaccccaaatgtcacctcctcaatggaaccttcccggatccccacagccttcccatcccatgttccaggccggctgtgggcagcttggcccaatgctgcctgctgagggatcccgggtgagtgtccccagcaggaagggccctcgtgagacaggggcggcgggagaggagtagaatctgtgtccttgttcctgggtctggcccatgtgaggtcttgccgtggcgggtgggccttttcacgctggtgctggcggcagctgtggccatcaccaagggtttcctgcggtccctgcaacctcccgactctaaacactcgccatgtccccgagatccagggatgggactccccggccttcattcctccaactcttaatgatttttgaagcacttgatcctttgtattaaatacctccctccttgaaatgcccagaggggttcctgctttccagggcaaacctcaggtgatgacctcattgctaagttaagggcggattgtgcctccccaaaactcacaggttgaagtcctaccccctagcgccgcagaatgggacctcagttggagatgatgtcattgcagatgtaattagttaatgtgggtggtgttggggcaggttcctccatataacatattgtccttataaaaagggaacatttggccaggcgcggtggctcacgcctgtaatctcagcactttgggaggctgaggcaggcggatcacaaggtcaggagatcgagaccatcctggctaacatggtgaaaccctgtctctactaacaatacaaaaaattagccgggcgtggtggcaggcgcctgtagtcccagctactcgggaggctgaggcagaagaatggcgtgaacccgggaggcagagcttgtagtgagccgagatcgcaccactgccctctagcctgggcgacggagcgagactccatctcaaaaaaaaaaaaaaggaggaggggaacatttggacacaatcataacacaagagaacacgtcgggaagatgaaggcagaggacggggggatgtttctacaaaccaagggacaccgacgccgcccacagtcaccaggggccgggggacacatgggccggattctccctcggagcctcagaaggaatcctccctgctgactgcaaggaccggggcgggccggcaatttccgacagcaggggaaggatgacatctttaaaatcacacacaagggccctgcagtctcagttgaagtcagagggagaaaatcagaaaacaaggaggaacagtgaagaaaatcttctggtagcaagaccacggcatccgaaaatgatttcccaagttttaccctacggctcggaggattacaacggaaattaaattctcagcctccccaggtaacctgtgtgaaccttagagcagagcggggggaagtggggatggaaggacctgaggggtaaccctgatcccctgcccagggagtcccactcagccttgcttgccggcagaagccaccctcctccctatctgaggcagctcccacactgggagacctcacctgaagcatctgcctggggcaggaggctgattcccctcgagacccaggcccgtcacccctggttgcctctaaccccatagctggagtgagatcccagctgactccagggagaagaataaaaacctgccacaccccaagatcatcaagattttgctaattcaagctggagactagtggtgagcgtggatcccactgtcagggcggctgcacactccagggactctgagctcaactgtctgcctgagtatctgtgagaaactggagctgttcgctctatttgttgctggaaacttggacttggacgggcgtggtggctcacacctgtaatcccagcattttgggaggccaaggcaagtgaatcacctgaggtcaggagttcgagaccagcctggccaacatggtgaaaccccatctctactaaaaatacaaaaaattagccaggcgtggtggcaggcgcctgtaatcccagctactcaggaggctgaggccggagaatcgcttgaaccctggaggcagaggttgcagggagccgagatcacgccattgcactccagcctgggcaacagaatgagactgtctcaaaaagaaagaaacctggacttaacagtggcccagctgagattccaggatttcctcagtagagcacagagagaagaatccagcagcgtagagagccaggaatgccaaatggattcgtcagatgcaacccattggctgagtccctcatcacctccccaaaacattccttacaaaggcctgcaacttgcccacaaggaggctctgagctctgccgccaacaagactgtgtcccctgatctctcacgtgaccctggagtggcaaagaccgagagtctgagatgggacaggctcggtgacagaaggagcggccagctgggagcagagagtgccacaggggtcagggcccttggctaatgggtcaagcatccccagaactgaaaaagatggacagtctatgaaagcttaaattgatcatttttttaaaaaccaggtcaggcgcggtggctcttgcctataatcccagcgctttgagaggacaaggactgaggatcacttgagcccaggagttcgagacccacctcggcaacataatgagaaccctatctctacaaaaaatacacagattagccaagcatggttgtgtgcacctgtggtcccagctactcgggaggctgagtggggtggatcacctgagcccaggaggtcaaggctgcagtgagctgtgacggcaccactgcactctagcctgggcaacagtgagaccctgtctccaaaaaaaaaaaaaaaatacaataacaaaaacaaacccagatctaggccaggcgcaggggctcacgcctgtaatccccgcacttccggagaccaaggtgggtggatcacctgaggtcaggagttcaagaccagcctggccaacatggtgagactcccatctctactaaaaatacaaaaaattacccaggtctggcggctcatgcctgtaatcccaggtactcgggaagctgaggcatgagaatcacttgaacctgggaggcggaggctgcagtgagccaagatcacgccactgcactccagcctgggtgacagagtgagactgtctcacaaaaaaaaaaaaaagaaaaagaaaaaagaaaaaaaccagatctgccatgaaataccttaatggagagtggcgatccctcaccagttccccggcctgaccagtcccaggactgggcccccaaataaaggggagaacatgcctctccgtggaagggcagacaccaacaccttcaagtctccctgctgccttctctaagcacctacaaccattgctctggtcatcttttgctgagtaacaaatcaccccaaaactcagtggcttaaaacaataacaaacacgtattttgctcacaaatctgtgatttaggcaaagtacaccagagaaggctcgtctctgctccgtgtgacatcagctggggtggctcagcggatgaggggactagaacatttcccttctaagaaggctcatcccatggctggccaggtggtgtcagtgggcggttcctcccaggggctgcttggctcctcctgacttggtggctgagttccaagaacgagagtccaggagacaccaggtagacactgtgtcttattttagtttagtttagtttagttttttgagatggagtctcacactgtcatccaggctggagtgcagtggcatgatctcaactcactgcaacctccgcctcccaggttcaagcaattctcctgcctcagcctcccaagtagctgggactacaggtgtgcaccaccacgttagctaatttttgtatttttagtagagacagcgtttcaccatgtttgccaggatggtctcaaactcctgaccttgagtgatctgcccgcctcagcctcctaaagtgctgggattataggtgtgagccaccatgcctggccatctttttttttttttttttttttttaaatagagatggggtctcactgggttgcccaggctggtcttgaactcctgagctcaaataatcctcccacctcagcctcccaaagtgctgggattacaggtgtgaaccaccacacccagccttgtgtcatcttttgtcacctggtctcagaagtgacatggcaccactgccgccataattaaaggctcagcggtgtgccactgtcacccctcagctccaaatccacccttcctaggcctgtttgtgctggtggagctggaccctgtaaacgtttctcctcttctggccagctcagcctgaggctttgacgggagagggagctggaggttgcagcgaggcctggcagagaatggggcctccctgtctgaccccttccttgctgcagctgccagtggctccgtgtgcgggtgactcctccgtgagtctctgccacccatgggctgcttctcgcagacaccccccgtctgtcgtgctccccagcaagattctcaagcacctggcaggagttcctgttagaaaagctctggcccagatgcacccctcagtgagtttctcggccaactggcaggctccccacggacggctaggctctcaccctgcagtaacttcctccaccacgggcagggacagcctgcagggtccagcagagcccagggcaacttcctccaccgcgggcaggggaagcctgcagggtccagcagagcccagggcaacttcctccactgcgggcaggggcagcctgcagggtccagcagagccaggcccagccttgagttgggatgttcttccaggttcttggtttctcctcgtgtgctccctgtctgtcctagaaacacacgctgcttctggcactgctattcctgtattcctcagagttctcttgtaaccttttaatagtgaaacctccttttctagtttataattctttatattaaatgttcctgttcaaattactggtgtggtttctgtctcctgcctggaacctaatggtacagagttagcacaaggagaggtcccaggagggcatttggggactgtttgcatcgtccctagggtgtgaatgcctggctgagtttcctgccaatgggaaacggggtgctgggccccactttgcagtggatttgctgtggcctctggttgggtaaaaaaaagggctgggtgagactggtgccggggtgcccaagcggctgctgcccttcagagcagaacagcaaggacaccccaggactgtggactgggggttcctgctccacacactgggcgttcacagcaatcagatggctggcaggagcagctcctcccaggcctcgggtcagctgagaggcagagaatgttcgtggcagccctcacaggagctgctgtttgtggtccctacggggctgacattgctggaaatcaaacacaatgttcagtcccgcgtgtcacctgatcacagggtcagctgagcgcacagccttgcccgtgtcctcacttgagaggcagaatgctgacaggacagcacccctgacccagagtggaggcagcgcccggaaccccgtggagctcacagtcggctcctgccagggtgccccgaggctcccttgccagtgggagtggtggtggctgaggttgctggtgctcctgagtttgaaaaccctcaagagcccaccgttaagacccttgtgagaggttgccgtcctccccaagccagcacagccacctcctgttgcctacaattagcatcagatcttagggatccgggacagcgtgacacagaagacaacagctcatgctgggacttgggaattttttctgtaagagaacaaacagcacccaggcacggtggctcacgcttgtaatcccagcactttgggaggccgaggtgggtggattacctgaggtcaggagtttgtgatcagcctggtcaacttggtgaaactccttctctaccaaaaatacaaaaaaaaattagctgggcgcggtggcagctgcctgtagtaccagctactcaggaggctgaggcaggagaatcgcttgaacctgggaggcagaggctgcagtgagctgagatcacaccactgcattccagcctgggtgacaaagtgagactctgtctcaaaaaaaaataaaaataaaaaatcaaacagtaaatatcaggctccgtgagccacatacggcctctggccaccttgctcttgctcttctccttctccctcctccattcctcctccttttcggtgtgtgtgtgtgtgtgtgtgtgtgtgtgtgtgtgtgtgtgttttacaatccttaagaaatgtaaaatccactcttaactcaaaggctgtacaaaaaaatagattccaggccggatgtggcccgcaggctgtagtttggcaaaccctggcttacatgctacaagaattcagagatatttcagatagatatcgcggggaacctggggagaacctgcgggagtggattcgggggggttggaccgggaacaccgaatcggaacactagagggggctgaagtccctgatctgggggccttgatcgctctgccgggtctgcagctgcagccacagctaagcgctccctcgcgcgacggctgaagctcagacccagaggcccgcaggtcacgaacccaagaccccagaccctccatggcctgctgtggaggagagaatccgaaggtccacggacaggcagtccgtgagtgtgacctgcacgcccacacccagccacgccctgcaggctcagaagcaccaccttcccggacgtgaggaacacccgggcgaggggagcccctgcaccctgaaaagtcctgctactgctctccttcgtaggccaagtgtgaccgcggggagaggggtgccccggcagagatgcgctccttgatctccatggggtgacacatcccagagcagcagcaggacagggggcaaccgccgccgtcaagtcccacgcgggctgtgtgtgccagcggcggcagaaggaactggcgctcgggatgccgtggcctgcagggtcctccggcgaatcacagtgcccagggtgaaacaaagggttggcagaccagagtgctgtttgtcttacacaacagaaacaaaactctgggtctggtggccaaacctgacttgagtcaccacagtggacagccacggcctctcacctgtttccaggctgagccaattcacagacctggagcccttgagttgggggccaggttccttgagggagacccctgaagcattgctgcaaggaatacagcagcaaagccacgggaagagtcccccaaagggacctgtacctgtttaccaaagtaactgtgtaacagagggagggaaatactcaagcgtctcaggaatgacaagacactggcatcaaatggattccaattccttttctttttctttttctttttttggagacagagtatcacactgtcgcccaggctggagtacagtggtgtgatctcagctcactgcaacctccacctcccaagttcaagcgattctcctgcctcagcctcccaagtagctgcgattacaggtgcatgccaccatgccccactaacttttgtagttttgtagagacacggtccactatgtgaggccaggctgatgtcgaactcctgacctcaggtgatccacccacctcagcctcccaaagtgctggtattacaggcgtgagccaccacacctggccagatggagtctgctagagtctcggggattttatagggacaggatgggggcgtggcaggccagggtggtctttggaaatgcaacatttgggcaggaaaacaaaaatccctgtcctcacctaggtttgtgggcacaggcggtggggggatccctagccaaggatcacgccttcctctacccagctcttccttcccccttcatgaggagcagggagtagcaagtcttttttttttttttcctcaacgtccccatggacaccaaggaaaaaagtacttcagatgtcttggtgagacaaatcagagggtgggagatgaaccccacaaaaattcaggggccccctcacctcagtgaaggttctggagtccagaggtttggaacaggtgataattattctccttttgatgttatttgttatattttttgtagagacgggggtcttgctatgttgccaggctggtcttgaactcctggcctcaagccatcctcagctgagtgcttttctttgacacttagtgaatgctcaggaaccacagtcaggatactcaggcgggaaccggggtggcttctcccttttaccctttatccccattcatgtgtttcttagccccccagggaagaatgcttctgtgggggacgcagccacgattccttggaaggagaagctgagcccagccatgctggtctcctcctggcactgatctacagacagggagcagcgcagtggaagagggaagatcccagggctgaaaggctgggtggagggcgctgctggtcgcatttcagggaacattttaaagtgcaaagcgggccgggtgcggcggctcacgcctgtcatcccagcactttgggagcccgaggtgggtggatcagaaggtcaggagctcaaggccagcctggccaatatggtgaaaccccgtctctactaacaaacattagccgggtgtggcagcaggcacctgtagtcccagctactcaggaggctgaagcaggaaaatcacttgaacccgggaggcagagtttgtagtgagccgagatagcgcccctgcactccaccctgggcgacagagcaggactccatctaaaaaaaaaaaaaaaaaaaaaagtgcaaaacgttggatatcacatcattaatgcggcattttgtgttcagagccagtgggacagtgattcctgcacaagattcctgaaagcctggggagactgaattatgttaatctaaaaggatcccacctaattaggagataagaaatttttgccttcacctgcacaggaagggtgcacggaaacacgtcatttagaacatcccgggcccgaacatcgcgggccctaacatccaggtatccgtgccacttctccgtaccggtccaaggaggccgcggtgttcgcggcggtcgccgagaccggcgggctgtggtttcgaacccgcggcaacggcgcgcggccggaggcggcgctcggccttcgcgttccgcggcgcctggcccggcgcggccgccgtagcgggaggacccgagctacggtggccgcggggcggcggtggcgattggacttggtgggtcccgggccaggggcgggcgccgccatgggtaacctgttcggccgcaagaagcagagccgcgtcacggagcaggacaaggccatcctggtgagggcccgggcccggggtcagggctggggccgggacaggcgacggggccggggcgggcggcggggccggaagagccccgcgccctcggccccccgcgttcggatggggaaactgaggcgcagcgcgcagccgggcccctcggtctctccgccctgcgtccctcctcgcccgcggggcctcgggccggggtctcctgcgcggcgccgtggctgccgtcttccccggggcccgcgcgtccgcctctgcgagccccgccggggtgggcgcggctggtgactgcgggattcgacgccggcgttcggggctcggccacagcctggcggcccgtccgtggggtccgcgcggcgctgggctttccctggctctgggcccgcgggagcaggtcccggctctcccggagtcgctgcccccgcccccgtcccgcggctcatttgcctcctggtgccctgggccggagccccggcggtgctgccggcttcgcgaggcagcgcggggcatcccctctccctcaccccatccaggccaggactggaaggaagtctgccctggtccgaggagcggccgacaggtgcgccgaacgcctgccggggtcctgccggggtcctgccgggcttccgcagcgcctgggtacgggaccaccgtgtttggcgcgtttgtttgcggcgactccagactgaccccccggggcacagccgggccggtggtggtgccttttcccatgtgaaagttagcttctgtaggaggaggaatcgcctggcatgtcagggacagggcgggttaagaatagtccatttttgtaacgagataaacgtgtcacgaaagagaccccgaaatgaaagcagggctagctttttcggatgctttcttttctaaattttgtgcaacagaaataggttaattttatactaaaagagaagcgaatgtaaatgaaagagggaatcttacgttggcatctgagtccataagctgtgaaaagaaacaacgggcacatttgtccctagagaagatgggcacagcgctgggcaccgtcccgagctgcctgcaagacagctggacccagcctccatcgtccaccttccacctaccctgccagccccaaggcactccctcccctctctttaaggactcagctccggtttctcttcaagcacagctttccacttgccaagggtcactgtgggctctcggctgtgcagacccgtgttgcgggctgccgtaggtctccctgggattttgggtgcttgggaacagcatccttagcacacactagcacaaatgattgcttttttttttctgtttttctaggataacaggtgttccccacgtggcctgtgaccctccactgagaccttgttttacaggggggcagcctggccacacctgcctgcctttggcccctgggtctccccagcagtggggctgggcagggggcacctttcactgtagcaacgagaggacccacaggccttggcacggcgagggggagactccgtgggtggagggaaccgggaatgagccctctcaggtagagggagcactggcttcccatgcggagtcttaaagaggcacacaggccctgactgagctaattctcctcagcctcctgccttaaggccataatccctgtgcctgcacgggctcagcattgtctgaagtgatgacgtttggaaaacttaaggacctgatagagcaggactggctgaagttcctcagtggccgagtgccctctctgggacggcacacagatgagaggcggtcagcggggccgagtgggtgtccctgcagccggatggttggcaaaggggcagggaagccacaggcatctcatgcggctgaagcgcaaggagagaagccggggggatgtctgagccctgtcctggccgtgtggctggtggcacttgggtactcgccacctgcatgttcttgagtcggaactttttttttttgagatggagtctcactctgtcacccaggctggaacacagtggcatactctcggctcactgcaagctctgcctcccgggttcacgctgttctcctgcctcagcctcccaggtagctgggactacaggcaccgccaccacacccggctaatatttttatgtatttttagtagagacggggtttcaccatgttagccaggatggtctcgatctcctgacctcgtgctccgcccgcctcggcctcccaaagtgctgggattacaggcgtgagccactgcgcccagccgagtccaaacctttgaggtcctggcagctgctccctgacctgagcctagagtgcttgtaccgctggcaggcagcctcgagggtggacccacagcaatgccacggtggtcttccccatccctgtgatgggctgtggagtccgggtgaccctctggtggggccgcctcttgtgtggcaggatgtggagctgagtccctggcttccacccccagacgtgtccagacagcaccacctgtcccctggaaggcaaccctgccccatgaaggacactcacggagggccgcccggcctccatgcctggcgctcagtagcgtggccagggctcccagtgtgggctcggtgacgccaggccctctctctcttggcagcaactgaagcagcagcgggacaagctgaggcagtaccagaagaggatcgcccagcagctggagcgcgagcgcgccctggcccggcagctgctgcgggacggcaggaaggagtgagtggggcccgggcagcgtgggcaccctgtcggctggggtggggggcccgggcagcgtgggcaccctgtcggctggggtggggggcccgggcagcgtgggcaccctgtcggctggggtggggggcccgggcagcgtgggcaccctgtcggctggggtggggggcccgggcagcgtgggcaccctgtcggctggggtggggggcccgggcagcgtgggcaccctgtcggctggggtggggggcccgggcagcgtgggcaccctgtcggctggggtggggggcccaggcagggccacagcgggtcactctcgggcttccctctgcagacgggccaagctgctgctcaagaagaagcgataccaggagcagctcctggacaggacggagaaccagatcagcagcctggaggccatggtaggcggccgggtgcttcgccctggagtgcaggtgcagctggaggcagctccgcccggctgcgtggacatcagaaatttctcccgagagctgaaagctcctctcagatgcctcgggctgaagctgacctgaagaggggcgggcctggaatcccggggagtctgccaggaagctaatggtcttaagaggctggggggcaggttggctctcgcaggactgaggtggggaaggttgggccacccctgggtggtgtgggtaggtcaggggtctgcatggggactgagtgtccctggtgttagggacccgagcggcgtggttctgctctttggtaaccagagctactaacaagcaaccagcggtcccctgagtgtgtccctggcacctgctcagtcctgcgcatccccacctggcagtgggagaggacagggaggagcaggtgtcaggagtcaccctcacgcccagcagcacccgcccagcaagggtgtcatcctgaaccctgccccagggccgggaggagggcaccccggatcctcagcacctgcgtctgctctggtttccttttcaggttcagagtattgagttcacccagatcgaaatgaaagtgatggaggggctgcagtttggaaatgagtgtctgaacaagatgcaccaggtgagtctctgcagggccaggggcatggaggtgtggggagcccattgggctggagctggggatagggcggggggcttgtcccacggtgttcgtgtcagacacagggcaagaggctggcaggggagatgtgttgggtgctgccaggcaggcagggatgcagtgaccgggtgcagcacaggctgggaactgtgggaactgggtccccaggcgccgaagtgacatagaagggaagtctgagggtggggagggggctggcaaactaatcacagaaggcttcctggaggtggcgggtgtggtggctcacacctgtaatcacttttggaggccaaggcaggcagatcacctgaggtcaggagttcgagaccagcctggccaacatggtgaaaccctgtctctactaataatacaaaaatgagccaggcgtggtggcaggcacctgtaaacccagctactcaagaggctgaggcaggagaatctcttgaaccgggaggcagaggttgcagtgagatgagattgcgccactgcactccagcctggatgataagagcaaaactccgtctcaggaaaaaaaaaaaagaaggcttcctggaggaggtgaataccggcctcatctcaggccgggcatggatgtgaagcccagcgtggccataccacgttcccccaccaaccccatcacactcctgacatgggggccagtaggtggggctagttggagagccagggactcacctggcgggaggtctggctgtgctacttttccaagtgtttggtgagtactggtggtgtgtgccggtcaagcacaagtggccctttgaccttttgccactcaaaagaaatcaagtcacctgcccagaatgttctacctgttgcttgtttttactggcggctgtgagagctgactcagggtgagagggggcatcgggcgccagggcagtgcagtcgtggcctctgaaaagactcatcaaacggcccctgtggcctcaggacaggcccatgcctgggacacacatgtcctggcctcatttaaacagggacaggagctgggtgtggtggcatgcacctgtagtcccagctacttggacggatcgcttgagcccagcctgggcaacacagccagaccttgtctttaaaaataaataaaaataaacagaggggtgaggccatggccctgagagcccaggaggcctctgtcgggggtctaccattggcctcgcgacaggggtcaacacccatcaccctcgtccacaggtgatgtccattgaagaggtggagaggatcctggacgagacgcaggaggccgtggagtaccagcgggtaggtggcaccctgaccggcctgcccccaactgtgagaacccacaaggccaccctcgagggccaaactgtcccacatcctagagcggccgccttctctcaaggggacgagacccagccacaggccatctccttcctccctgaggggccacctcctcgctgctctcaccaccgcctgtccttttgcagcaaatagacgagctcctggcaggaagcttcactcaggaggatgaagacgccatcctggaggagctgagcgcaatcactcaggtaacggcccccccgggactgagcacagtcactcaggcagcgggacccccagagctcagacccccaggaggccctgcccatggtgatctcgtatgtggtgtcctttaagtaaatagtctgcggtttgtgactggttttcctacctgaggtgactctgttttcagggttgctcacccaacggtctggtgcaggcaggctggccccgtgccctggacagagcgggggtgctgggccttcctggcgcctcggcccctttctgtccccggctgtcacggatgtggtgctggctttccccagccgtggctgctgactcacgtcccacataggccctcgctgcgggggccgcgtcctggccccaggctcacatccaggctctgagtctgtattcactccccgacacaggggttgtcctctctgtgggcccctgcctcagtccgccaaattctcatggtgcccccagagccggcctctgccccagccctgctgccagctgccccggcgccctggtgctgtgcggcccatggtgcctgcacccacttgcttgtccagttactttctcctgagggtccgagtcctccggggcctccagggaaggccagctgagaggcagaagcacccgtgctggcttaggcagccaagctcgctgggacagcgttgtaccgcagcccaccccgcagtggtggacaccagcgtgacctgggtgtctgtgtcacccacccctcggtccctgagagccagggtctctggggcacacccaggacgtcgcctccttacagcccctcagcgccccagggtctgttgggaggagcctccatggtagcggctgcgtcaccacctaggggattctggtggcaccagaagccggggcggttgcagacttgggtcttctgagcagcacgttcctgtccgctttaactccggctgagagcggctgacggacaggatccgtgtcctctcggggaggcccaggcagcccggggcagacctgtcacctgctcatagccttaccctttgcttcttgcaggaacaaatagagctgccagaggttccctccgagccccttcctgagaagatcccaggtatttccatgtttgattcttttgaatggttggaattcgcaggagaaaagtggattctagaagggaacaagacagaatgctcccaggccttcctgggccgtgggcaagccctgctgcctggctgtttggcttgggggcgtgcgtgcctggccttggggttgggcttgggtttcccaggggttcggtaactgggcaacctcataagagagccataccccattcaaagagacacattcagaaatcagaactggggaaaggcttctttagcagcaccagctcattcccagggtgtagcccaggattagccctcagccagggatggctctccccgtggcaccattcagcacaggctctccaacctgcccactgggaagctgactttagaaccgtccatccacgtttgttctgttcctttacccatctttggggctcttctcctctctgagtcccgctgggaggggctgtgctttcctggcccactgtcccgtgtccctggccctgtctgtcagccccattggcttcctgtttgtcacttgcctcccccagagctgggcgtgcccttccctagtgcgaagtccccggaactggcccttgccacccctgtggcctcgtccctctctggaggtctctgcctgtgggtctttggcgtgtcataaacatctctgtttcctccacagaaaacgtccctgtcaaggccaggcccaggcaggcggagctggtggcagcttcgtaacgtggcctcgtcttgtgggactcacggggatgccccagggactgtggcccacagagagtttgggtcacggccagcccctgaccgggttccctggagcccagtgcgcacggtgctgagcagagctgcagccacgcaggcgcattgcaggaggactccagagcgtctcctggagaccttgagcctgaacgcactcaggcgccactggcctgctctcagtccggattaactctcgaccgagcccagcttctgccggttgtgggctcccccggtggccgaggcccaggcccaacgcctctggtgctgttcccctgcagtcccagccccgcgtggctcgcgctcgtctgtgaggaagacacctccagaccttggggtccccgcgcttcctcttgctcctcgctgctcccattagctggtgcaggcttccgttaaggggtccctcccttggcctggcttcccggcgcacctcagcttccctgctggtggggggatccccaggagaccagcatgtgctgaacctctctgtgcctctgcctccgcaccctagacacccacctccagtttgaaggtggcgggccaggggctttcttgctgaattgacgactccgagagccctgactcccgccttgccactcacggctctgtccactagggctcagccctgctgagaaaggacctccgatgcttgggagacgctgctccggcaggtgcagccccggaagtttgtccatgggggtccccgcggctggggctcatggaactgcgagacccgggaccctcctgccctgcgggtccccgagccaccagcagccaggactggaggctgtggggcatggcgtgacttctcgtgcacagggctggtttggttatgagacgatctcgctgggaccgcccctgcccgtggaaagccacaaggacaaagggagcggccacctcgacccccagacaggccggcccgtattaaagttggccctgcacgcccactgcctcgtggacttgggcgcagtgggcacctaggcgtggctccctctgtgggagcgtgggtgggttgtgtgcggcccctcccccacggtgaccctgaccaaagcccagccccttgaccagcatggggacgctcactggagggctcctgcccagtccggccaggcctgggctctgcacacgtgagatggaagctctgggccctgacggccacctctgggcagctgccctccatgggggccagggtgctgctctgagcaggctggcaggctgtctccctcgcgtggctgtgtgtaatcctgggcccagagggtggtgggtttggggtcctggtgcccaggcgggaatcttgatgtgcagggaacacgatgggcaggtgacccccaaggggtggctccacaccccgcaccggtgggcatgggggtgctggccctgcactgccgggtctcaggactgaagaagctgaagacctgggtttgggggaaagtcttgtttctccccgtggcggcagctctcctgcggtgcacgtgtcagctggggttgagggggtcttccaaccacccttgcagggattctgcagaaaactagttggctggcgctccccctgtctgtccccaggactgccaggcagcctggagggcacctcgtgatgaggctccagccccatgacctgctccctgcagcagtgcgtcccaggcctgtggagcaccggctctgggtcccaaactgcacgcagggtgccaggagcctgcgttgggaagctgcaggtgtggctggaggggccctggctactgtcagtcccaggcctcagtcacagcctttacacaccctgcctgtggggcaggtccctcctttccctctgcctccattagaacccaggggcttttgccaagagaggccgggtgttctggcggcattttgtggcaggactttgctctcagccccaaccggagcagctgtccacagtgccctcccccttgtgccaagttcctggtcagggcccaggaggccatccagggaacgccaataaccatccatccctgctacagcacagccaggagtggggtggggtccacgttccctctgactatccaagaagttagagcctgactactactcagccgtgttctgtgtaccagtgttcctccctggacctcgcaagagtctgcccggacaacccagagtgaccttgagctgattcccaactctggcattggtgtgtcctggctggccggctcctggttatgtcgggctggtggcagcccctcctgccagcaaggtacagagcccagtgctggccggagcctgaccaacctgatctcctaatctaggttggggacacaggagcatgacaatcacaagtcaaaattaggtgtggaacctcagggcggagctggtgtcctgccagagatgcctgggggccggcgggaggacttggaggaggagaggctgcagagggcagggacacagagtagggggccacacaaagggtggctcagagtggaggaggggcataaaggaagagccatacataatcagcagctttgaagggtgttggagcctgccagccacagaggacttcccagggagggaatggggcatagtgtggaagtggtgccctcattttcagaggctgcagacacttcgctggaaggcacacttgccacggggcaggcagtgtggcagtcagaaatgtgtgggatggaatgggcgcggtggctcacgcctgtaatcccagcactttgggaggccgaggcgggcggatcatgatgtcaagagattgagaccatcctggccaacttgacgaaaccccgtctctactaaaaatacaaaaattagctgggcatggtggaacgcacctgtagtcccagctactcgggaggctgaggcaggagaatcgcttgaacctgggaggcggaggttacagtgagcagagatcatgccactgcactccagcctggcaacagagcgagactctttcaaaaaagaaatgcgtgggacagaatggcgggtccatcctggacgggatggggcccctgacccctgtgtgcctgcgctctgccagctcctgcgcagagcaggtactcgggggagggaggatggtttgctccaaactcaggtcccaactggtgtctgacttggccgcagaatcctttgggtcctggtttcttcatacatgcaatattgggggtttggccttgggggtctcttccagctgagtccacttctgtccccagcctgtaaactgtctgcacctattgactcttgatggtctctgagggactcaactttaggaactctgtccgttttgtgctgctgtcacagagtgcttgagactgggtaatttataatgaacaatcaactggctcacggtactggacaggtgccagcatctggcgagggccgtccagctgcgtcatcacatggtggaaggcaggaggggagccaccccacccttttataaccaatcccagccgttagggcgcagccttcatggcctaaccaccctctgaaggtcccactcgatactgttaaaaggcaatgaaatttcaacaggttttggaggggacaaacattcaaaccatggcagaaagtgtggaaggagcaataaccacactgaacagaatgaccatggtaattaaaccccaagtgaaaccatgacctgttttacatcatcctggagagaacagtgcagctccagtacttgctgagctgcagagacagggtccatccaactcgacagcatccagcagccactccaggccgccagcagacagatgttgggagcagcactgatagtttgggttttcgtttgtttttttaagacagggtctcacttgcccaggctggagtgcagtggtgtgattatggctcactgcagcctggaactcgggctcaagcgatcctcccacctcagcctcctgagtagctgggactacaggtgtgtgccaccaaatccagctaatttttgttactttttgtagagatggggtctcactatgttgcccaggctaatagatttttttaaatgatcatacaggacggctgggtgcagtggttcacgcctgtaatcccagcactttgggaatcccagtactttgggaggccgaggcgggcaaatcacctgaggtcaggagtttgagaccagcctgaccaacatggagaaaccccgtctctactaaaagtacaaaattagccgggcgtggtggcgcatgtctgtaatcccagctactcgggaagctgaggcaggagaatcgcttgaacccaggaagcggaggttgcagtgagccgagatcgcgccactgcactccaacctgggcaacaatacaagactccatctgaaaaaaaaaagatcacacaggaaaacagaagttcgattttacgtcgtacactgctgtaatttcagcacatgtggactcgtgtaaccaacaccataaccttccatcacccctgaaactccctcccgccagccctttagggttgcccctccccccgaaccccaccagcccctggtgaccactgatctgtcctccaacccatagtgtttttccgggaatgtcacaaaaacagaagccgaccatgggtcacctttctggcgcctttctccccgcacaaagtctttgtccttgtgaagttgtcacgtgccaaacgcttgtccctttttcctgctgggtaatactcccggtgccgcccttgctgttcgtcgatgcacatctggctgcttttcgctggctgcgagcggagctgctagggacatggccacggggctgtgagagcggagtttcctctctccggtgaccctgagctgcgcctttctcagccgcctcccgaggccccaggcgctctgcgggggctctggcggggttggtgggggtgggcgttctcgttgtttcagcggcgctgccccaggccctgcgggagggaccgtgggacccgagacatccccgcctggcctccgctccccacccgggagtggggctcgcacccccccaacctcgggtaaagacgcttctggaaggaagggcgccccgcggaccccgcccaaccctgcccagcccagcccagcccagcccagcccttcccggggcggcggcgcgggaagcaggcggcggcgcacgggcgtcgtcatggcaaccccaccggctccgggggccgggaccgctgccccctccgcccctcgacccccgcccccccgcccttcctggctgcggctggacccggctgcgcggggcgcgaggctgcctttcccgggatcaccagggaccacccggcgcgctccccgggaatccgcacccctggccccagcgctccggagcgacccgggtcagcccctggctgcctgcaatgggcccccgggcgaaccccgggcggacccaggagtgagcacccggtgcgcggcaacgatgatcccgcaagggaagctcacgggaggcaggagctgtggcagccgccccaggatggggcgcggggagcgcgctgagctgtcctttcccgcagcggccccgcggttgaagcgtgggcttgggttttggtttttcttctgtggcaacagttctgttgagatattactcgcctgccatacaactcacccattttaaaagtacacctcaggggtcctgcgtgtattgacaaacccgccgccgtcaccacagccaatttcagaacattttcatctcttcaaaagaaaccctgtacccttcagctgtcaccctcctggtccccatccggtcctcgtcccgccctcagcagccacgcactgcctgtaaagtcccctgtcctgccctgtaggtggaatctataccttggggtctgttctgacgttcacctaacagcctttccaggctcagctgtgctattgtatggaccagggggttgttttgtttttgttgtttgttgattgtgtgtgtgtgtgtgtgtgtgtgtgtgtgtgtgtgtgtgagcctggcgtggttgcgggcgcctataatcccagctgctcaggaggctgaggcaggaggatcactcgagctcaggagtttgaggctgcagagttgatcatgccactggactccatcctgggcgacagagcaagactctgtcttttaaaaaaaaaaacggggctgggcgcggtggctcacgcccgtaatcccaacactttgggaggccgaggcaggcgaatcacgaggtcaggatttcgaggccagcctggccaacatggtgaaaccccgtctctactaaaaatacaaaaattagctgggcatggtggcgggcgcctgtaatcccagctactagggaggctgagccaagagaatggcttgaatccgggaggcggaggcagaggttgcagtgagccgagatcgtgccactgcactccagactgcagccctggtgacagtgcgagactctgtctccaaaaaaaaaaaaaaaacaaacaaaaaacaataaataacaaggtcggctgaggtggctcacgtctgtaatcctagcactttgggaggccgaggcgggtggattacctgagatcaggagtttgagaccagcctgaccagcatggagaaaccccgtttctactaaaaatacaaaattagccaggcgtggtggcgcatgcctgtagtcccagctactcgggaggctgaggcaggagaatcgcttgaacctgggaggcagaggttgcagtgagccgagatcatgccattgcacttgcagcctgggtgacagagcaagactctgtctcaaaaaaaaaaaaaaaaaaagactcaaaaaaaaacaaaaatcagccaggcgtggtggtgtacacctgtagtcccagctactctggaggctgaggcaggagaatcgcttgaacccatgaggcagaggttgcagtgagccgagattgcgccactgcactccagcctggcaacagagcaagactccgtctcatataaagaaataaaacaaaaataaacaaattttaaaaacaaacacattcctatacaggtttctgtgtggacagcgtctgctcttgggtctgcacctgggagtggaattgctgggttgtgtggtaactggatgttcacccataggatgaacgaccacactcttttgcacagtggccgatggttctggtctctctacagcctcaccaactcttatattctttttgattacagccactctagcaggcatgaggtggtacgtcattgtggctttgacctgcatttctctggtgtctaatggtgttgagcattttttcgtgggtgttactgaccatttgtatatcttagagaaatgtctattcagataatttgcctatttttaattgggttcgttgtctttttattgagttgtaatactttattcgggatactagacccttattagacacatgatttgcaaatattttcacccattctttgggatgtcttgttaacctttttgatggtgtcccttgaagcacaaaagtttttaattttgatgaaatctaatttatttttgttgttgttccttgtgcttttggtgtcatagctaaggaacccctgcttaatccaagatcatgaagatttgtgtctatgatttcttaacagttttatagtttatttatatttatataaatatgtttttgagacagggtctcactctgttggcgaggctggtcttgaactcctgacctcaggtgatctgcctggctcagcctcccaaagtgctgggattgcagccgtgagccaccgcgcccggcttgacttcttccttttatatgtgggtatttttctgtcccagcgtcatttgttaaaaagacagtcctttctccgtgtaattgttttggcaccgtgtggaaacccgctgcctgtagccaggagcttctttccagccctcagttctgtcccattgctctgtgtgtctattcttacgtcctcatggcagccttgtagtaagctttgaaattgggaagtgtgagttctccaactttgttcttctttttcaagattgttttggctattctgggaccctcaaatttccatgtgaatttttaggataagcttttcagtttctgcggaggagccaagtgagatgttgataggagttgcgtagaatctgtggatgtgtttggagagtgccgccgtctccgctacattaagtccagatccgtggattgagggtgcctttccatttattttggtcttctttactttctttcaaccaagttttgtagttttcagagtataaattttatacttgttttgttcagcctattactgttttatttttggtgctattgtaaatgaaatcttcttaatttcaatttcagattattcacttaaatatacagaaatacagctgattttgtatattgagcttgtctcctgcaatgttgctgaacttgtttattagggtttttttaagtgaaatccttaggactttttatatacaagatgaggtcacttgtaaagagagatagtttacctcttaatttccaacctggatgcctttaatttcatttccttctctaagtgcctggttaaagcttcagtacaatgttgattagaagtgggtatcttaggctgggcgcggtggctaacacctgtaatcccagcactttgggaggccgaggcgggaggatcacgaggtcaggagatcgagaccatcctggctaacaaggtgaaaccccgtctctactaaaaatacaaaaattagccgggcgtggtggcgggcacctgtagtcccagctactcgggaggctgaggcagaagaatggcgtgaacccgggaggcatggtggtgcatgcctatagtcctagctacttgggaggttgaggtgggaggatcatttcagcccagaaaacggaggctgcagtaagccatgatcgtgccactgcactccagcctgggagacagagcaagaccctgtctcaaaaaaagaaaaactgttctgaagcacagtgtagtctagtactgtggcattcccacctgtattcctgcttgttccatttacttgagaaacatttttttcataaataatatgaaaacatatccatcccagtttctgtacattaattccagactaagagcatttaacctgagtttagtggtagatttaaggacactcatgagaaaaacctccatttatacaagaggaacaggacccttccttatctcgaggatgatgtcccgcaggagacgcctgctctcctccagacaggctctagggctgttcatctgacctgccttggaatgtctcacgtggctgcgacgccagcctttcaatcgtctcccatggatgaagccatcgtgggtgtgtctttggtatgtgtctctgttgcttggtctgccctcttttttttgagacggagcctcactctgtcacccaggctggagtgcaatggcccaatctcagctcactgtaacctccgcctcctgggttcaagcgattctcctgcctcagcctcccaagtagctgggattacaggcatgcgccaccacacgcagctaacttttgtgtttttagcagaggcgggggtcttgctctgttgcccaggctggtctcaaactcctaggctcaagcaatctgcccaccttggcctcccaaagtgctgggattacaggtgtgagcgactgcgcctggtccaggaagggaactttaacacataatggataaagctggaccctcaagcaaaataggaatatttaaaatccattgttttggattaactgcagcatctccagattatctttcctccattttaaagttacctacaaagggtccataccttgatggtagcatcagccctccacagcccatctctttctttctttattttatttttatttttttgagacggagtctcgctctgttgcccaggctggagtgcagtggcttgatctcggctcactgcaacctctgcctcctggattcaagcgattctcctgcctcagcctcccggatagctgggattacaggcgtgtgccaccacacctggctaatttttgtatttttagtagagacgggatttcaccatgttggccaggctgctctcaaactcctgacctcggatgatccgcccgtctcggcctcgcaaagtgctgggagtacaggcatgagccaccactcccggccagccagcccatctctttcactgttacaactaacaactcaaatccaggaaaaacaaagcaccccccgcccccgccaccaccgccctgccactgaggactctgcaaagtaaaccagtaaaccaaagctgtggaggtggcccctgtggggaagccgtttcctggttttatcttcccttttctctcgtagctttgccccaggatgggcctcagttacggaactgcacagaaacacggaaagctaaaactcccatagaaaccttgtccttttggcaagagaaattgtgaacaggggccactgaggtccagaaagcgtgtggtgggggaatcccagaagggagcgagtgggagaaagaggccttgggactctgaggaggaaccagcagcagccccggctcccccacccgagctgcacctgtgtggggtgcactcagagaagcaacaggaattggctttgaaagtggaacctcgactggagcagaggcagcagaactttgtggttggaactaaccaggttgatgggcatttaaaaaaaaaaaaaatcaacattctccagcggattgttgcggagtccacccagcataaccgtcaaaatgtccagttcatggccgggcgtggtgcccacagctgtgatcccagcactttgagaggcggaggcgggcaaatcgcttgagcccaggagttcgagaccagcctgggtaacctgacaaaaatcagtttctaccaaaaaatacaaaaataagctgggcgtggtggcatgtgcctgtattcccgctacttgggaggctgaggtggaaggattgcttgagcctggtatgcagaggttgtagtgagctgagattgcaccactgcactccagcctgggtgacagagccagacctggtctcaaaatttttttaaaaagcccaattcataatcccaaattatgtgacatataaaaaatcatgagaatgtgaccagtttccaaaggaaaagtgatacagtttggatatttttcctgcccaaatcccatgttgaattgtaatccccagtgctggaggtggggcctggtaggaggtgactggatcatgggaacgggtctctcatgaatggcttgggccacccccttggtgataagtgaattcttgctctgagtttacatgagatctggtcatttcaaagtgtgtggcacctcttccctgctcctcctctgccttccaccatgattggaagcttcctgaggcctcctcagaagcagatgctgcgatgcttcctgtacagctgtagaaccatgagccagttaaacttatttttcttataaattatccagtcttagatatttctcttttttttttttttttttgaaacagtctcgctctgttgcccgggctggagtgcagtggcctgatctcggctcactgcaagttccacctcctgggttcacgccattctcctgcctcagcctcccaactagctgggattacaggcacctgccaccacgcccagcgaattttttgtatttttagtagagacagggtttcattgtattagccaagatggtctcaatctcctgacctcgtgatccgcctgcctcagcctcccaaagtgctgggattacaggcgtgagccaccgtgcctggttgcttagctatttatagcaattgcacgaatggcctaatacagaaaattggtaccaaggagtaaagcattgctatagatacctgaaaatgtggaagcagctttggacctgggtaatgggcagaggttggaagagtgtggagggctcagaaggagacaggatgatgaggaagaagaatttgatgaggaagaatttggagcttcttagaaactggttaaatgattgtgaccaaaatgttcatagtgttgtggacagtagaggccaggttgacgaggtatcagctggaaatgaggaactgattggaaactggaacaaaggtcatgtgttctttgctaaggttttggcagagagcatggctgtattctgttcatgcctcgggatccatggacatttaaacttgagagtcatgagttagggtatctggtggaagaaatccctaagcagcaaaatgttcaaaaagtggcatggctgcttctaacaaactgtacttagatgagggagcaaaggaatgacttaaagttggaacttatatttaaaagagaagcagagtgtaaaagtttggaaaattggctgggtgtggtggctcacacttgtaatcccagcactttgggaggccaaagcagatagataccgtgacgccaggagttcaagaccagcctggccaacatggcaaaacctcatctctactgttgggaataacgctcaaaatcctaaggtgatcgaacactcaaacaaaggattcttttttgttgttctgttttgtttttgttttcgagatggagtcttgctctgtcacccaggctggagtgcagtggcactatctcggctcactacaagctccacctcctgggttcatacctcagcctcccaagtagatgggactacagacacccgccaccatgcctggctaattttttgtattttcagtagagacagggtttcaccgtgttagccaggatggtcttgatctcctgacctcatgatccgcccacctcagcctcccaaagtgctgggattacaggcgtgagccaccgcgcccagcctcaaacaaaggattcttagcaaagcaattttacttctgcgtagacaggtgcttctccttggccagttgccatgagagcacacctgaacaaaggggcatgagggcctttatttctgatgcaagtcctgtccctgtaccctttccccattggccagggttgggttgcacaaactgaactaatcccagttgggtagacatttgaactttctttagatatggtgggcatgtaagggagagagggaaagaagaaggggaaggagcgtttgcaatgagctagagactagtctcctttccaaataaggaaaggaatgtgagctggtactgataagcctggtcctgtggcgtgtccaggcatctaacaaaggcagaaaagagaaaaaggaaaaaggggtgggggaggtactatgaattaaggaagaaaggattgatcaggctatttgaagagaaacctcatcatatcccacatctactaaaactacaaaaatgagccgggtgtggtggagggcacctgtaatcccagctactcgggaggctgaggcaggaaaatcacttgaacctgggaggcggaggttgcagtgaaccaagatcacaccactgcactccagtctggcgacagaatgagactttgtccgccacgcaaaaaaaaaaaaaaagtttggaaaatgcgcagcctggccatgtggcagagaaaggaaaagctttttcaggagaggaattcaagcagagtgtggaggaaccacttcttagagatatttgcgtgtttgaaaatgagccgagaggtgatgaccaagccaatggaatgatgaccttcatgacagcccctcccatcacaggccctgaggcctaggggaacgaaatggttttgtgggccaggcccagggccccacttccctatacagcctcagggcagtgctccccatatggcatcccagcagctccagctccagcctcagctcacaggggcccaggtacagctcaggctgccactttggaggttgcaagctgtaagccttgacagctttcacatggcattaagcctgtgggtgcgcagaatgcaagagtgaaggcttggcagcctctgtctcgatttcagaggatgtatgagaaagcccaagttcccaggcagatgcctgctgcggggggcagagcccccacagagaacctttactagggcagtgccaaggagcaatgtccacaaatccccaaaatcccatctgactaattgagagagttggagcccccacacagagtccccgctggggcactgcctagtggagttgcgagaaggggccactgccctccagaattcagaacggcaaagtcatcagcagcttgcaccctgcggtttcacaagcactcaacaacctgtgagagcagcgttagggatggaacctgcaaagccccgagggcggagctgcccaaggccttgggagcccacccctggcaccagtgtgccctggatgtggagcatggagtcaaaggagattgttttggagctttcagatttaacacctgccctgctgggtttggaacttccatgggacctgtagtccctttcatttggctgatttcttccttttggaatgacagtacttacccagtgcctatattcctattgtgtcttggaagtaaattacttgtattttgttttacagtctcattggtggaagggacatgccttgtctcgggggagactttggacttttgagttaacgctggaatcagttaagattttgggggattcttgggaaggcatgatagtattttgcaatgtaggaaggacgtgagatttgggaggggtcccgggtggaatgatatagtttggatatttgtcctcacccaaatctcatgttgaattgtaatctccagtgttggaggtggggcctggtgggaggtgtttgggtcatgggagcttgggccatcccttggtgataagtgagctgtctctctgagttcacacgagatctggtcatttacaagtgtgtggcacctcccccatccccccacttgctcctgcctttgccatgtgatgtccctcctcctgctttgcctttgaccatgattggaagcctcctggggcctctccagaagcagatgccgctgtgcttcctgtacagcctgctgaaccacgaaccaataagcctttctttataaatgaccccgtctcaggtatttctttatagcagtgcaagaatgacctaatacaaaaagacaatcaacaggccgggagtgatggctcattcctgtaatcccagcactttgggaggctgaggcaggcagatcacttgaggtcaggagttcaagaccagcctggtcaacatggtgaaaccccatctctactaaaaatacaaaaattagtcgggcatggtggcgtgcacctgtaatcccagctactcaggaggctgaggcaggagaatcacttgaacccaggatggggaggttgcagtgagccaagatcacaccactgcactctagcctgggcagcagagccagactgcatctcagaacaaacaagtaaaaggatggggaaaatatatcacagaaaccctaatcaaaagaaagatggagtagttgtgttaatatcaggcaatgtatattcaaaacaaatatcaacagggataatgagagacattactcaataataaaagaaggcaaaacaatccaaattgtgtattcacctaacaatagaatttcaaaacacatgaagcaaaaactaacagaaatgaaaggtaaaacaatttcttacagttagagactttcaccctcctctttcagtattttgttgttgtttttagtcagggtcttgctctgtcacccacgctggagtgcagtggcacaaacatggctcactgaagcttcaacctcctgggctcaagtgatccttctgcctcagcctcccgagcagctgggactataggtacatgccaccacacctagctaattttttttttttttgagacagagtctcgctctgtcgcccaggctggagtgcagtggcgtgatctcggctcactgcaagctccacctcccgggttcacgccattctcctgcctcagcctcctgagtagctgggactacaggtgcccgccacctcacccggctaatttttggtatttttagtagagacatggtttcaccgtgttagccaggatggtctcgatctcctgacctcgtgatccgcccgcctcggcctcccaaagtgctgggattacaggcgtgggccaccgcacccggccactaatttttttatttttgtagagacgggctcttgtcatgttacccaggctggtcttgaactcctgggttcaagtgaacctcctgctttggcctcccaaaatgctgcgattacaggcatagtctactgttcctggcccctctttcagtaattgagagaataaatagaaaatcatgaaggatataggacacctgaacactgttaactggtttgactcagctgacatttatagaacattccacccagcaacagcagaatacacattctattcaagtgcatattggacatttaccaagacatatcatgttctggaccatgaaataaaccttaactaatttaaaggaattgaactcacacaaagcatgttctctgaccataatatcaatccaaaagccagtaacaaagagctatctggaaaatccacaaatattaaattaacctgtgagttaaatagaaaatcacaagggaatttagaggctgtttctaactgaaagaaaatgaaaactaaacatattaacatttatggattcttgctaaaacagtgtttagaggaaaacttagaatattaaatgcttatgttaaggtagaagaaaagtctgaaatcagttagctaaactttcaccttaattaattcaaaaaagaagagcagatccaaagcaagcaggagaaaagaaacaatagtgagtggacatcagcagaaatgaaaacagaacatcagagaaaaatcagtgaaagcaaaaactggttatttgaaaatatcaataaatttgaaaagcttcaagctagagtgatcaggaaaaaaagagaagatacaaattacaacattagcaatgaaagtgggaacaccaccccagaccctatagacatgaaaaagatattaaggaaatattacagctgggcacggtggctcacgcctgtgatcctagcactttgggaggtcgaggcgggtggatcacaaggtcaggagtttgagaccagcctggccaaaatagtgaaatgccatctcttctaaaaatacaaaaaaaatagccgggcatggtggcagacacctgtaatcccacttacttgggaggctgaggcagaagaatcacttgaacacaggacgtggagattgcagtgagccacgatcacgccattgtactccagcccgggtgacagagtgagactccatctcaaaaaaaaaaaaaaaaagaaagaaagaaaaaagtaaatatgaaatattacaaacagttttatgctcataaatttgacaatttagatttaatgggaaaattccttgaaagactcaaactgccaaagttcactcaagattaaataggtaaaccaaattgtcatatgtctattaaatgctaccaaacatttaaggaagacttaataccaattctacacaaactcttaaagaaaatagaagaggagagaacactttgcaattccttttatgagttcaacattaccttgaccctaagaccacataaggccattacaagaaaagcaaacagaccaatatcccatatgaacctagatgcaaaatcctcaactcattattagcaaataatccagcaatatataaaaatgagtctttatcctgaagtaatctatttattctgggacaaacaaaatgaggtttatcctggaaatgcaaggttggttcaaccttcaaacatcagtatcattcatcgtatcaacagactacaaaaaaaagaatcttatgatatctcaatagatgcaggaaaagaatttgacaaaattcaacatccgtttgtgataaaaactcttagcaaactatgaataaaaaacaacttccttaacttttcagaaggcatcacaaaaaccctacagataacatcacacttaatgataaaagattggatgctttccccataaggaaggaaacaaggcaagggcgtctgctgtcaccacatctattcagcatcatactggaggccccgttcagtgtaataagcaagaaaataataaaatgaacacatattgggaaggaataaatacacaactgtctctatttgtggacagcatgactacatagaaaatctcaaaggagtctactagaacaaattagaacatcacagaatactaggtcagtgtacaaaatgaaatgtgtatttctatttgctagcaaggaacaattggaaactgaaattaacattttatttatttttattgacttacatttttagagacagagtcttcctctgttgcccaggctgagtgcagcggcatgatcacagctcactgcagcctcaaactcctgggtacacgtgatcctttggcctcagcctcctaagtacaggtatgtgccacaatggccagctaatatctttttttagaaacagggtctcactatgctgcccaggctggtcttgaactcctgggctcaagcgatcttcctgccttggcctgccaaagtgctaggattatggatgtgaaccactgcacccagcctattttatttttatttttttagagatagggtcttgctctgttgcccaggccggagtgcagtcatgcaaccatagctcatggtaacctcaaactcctgggctcaagtgatcctcctgccccggcctcctgagtaagtgagactacaggcatgcaccaccatgctcagtgcatgccttttttttttttttttctttaaggtgaggtctccccgtgtttcctaggctgatctggaactcctgggctcaagtgaccctcccactttggcctcctaaagtgctaggattataggcatgagccactgtgcgtggcctgaaattaacattttaaacatggggaaacagacttctacttccaagtaggatggagtgcagcagatcaaggctcccactaagaactagaaaggccaggcaaaaatataaaaatcatctctttaatggcatcagaaagctacagaagcaacaaagactaaaggggttaagcctcaaaagaggagggttccgtaggataagcagaccatctgcagcccgcagttcccaagtgcttgttcgtgctgggattaatgacacacgggagattcgaagggcagctaatcttggcaagaatgaagacgcgaaagctgatctcttcttcaagactgtggcaggactggaagctgcgtgaaaacgctggttgaagagctaatttgaaacttccggaaggcagagcagaattgtttacctcgctcagggctaaggaaggggagggctctagttgtccacagcaaactgtctgttaatttcctggaggattagttcctagaaacaagcaacacagagataggctcaccgaaagggcagcttgtcctcagctcagctcagtccctgattggagcgaggaggtcaccctccttaccgaggaaatgggggaccctctccgccggctggaacacagcgtcatccagagcaggctctgcccatcttttccttagccgggtagtagaagtggcctctgcctactgaaccgtgctgctgtagggcacacgcagccacagagcatctgtgaacaaatgggcatgggtgtgtttcaatacgctgcgttcacaaaagcaggcggctgccccccgctgcagtttgctgaccccggatctggagtctccaggcttcagcgcatgacatccagcattcagagaccacagggccaaaaatcaagaggaaaaatagcccgtggaaacggatgcacacaaagccagagagtggaagtcgcagcagagaacccctgaactctctgtgagtttttgtttagagttcgaactctgtgcgtttttgtttagatggaggaagcaagggagaaagtagatgaaaaggtggagatttttcagctgagaactggaatccatataacacaaaactttttttttttttgagacggagtttcactcttgttgcccaggctggagtgcaatggcgcaatcttggctcaccgcaacctccgcctcccaggttcaatcgattctcctgcctcagcctccctagtagctgggatgacaggcatgcgccaccatgcctggctaattttgtatttttagtagagacggggtttctccatgttggtcaggctggtctcgaatccccgacctcaggtgatccgcccgcctcagcctcccaaagtgctgggattacaggtgtgaggcaccgctcccggcttataacacaaaacatttaagaatctgcaaaccccaagttttcctgccatggcaggtctgagcacaaggcagccgggagaggtttaatcctgggtgagtcaggccgagttccagttatcacactgagaatcacccagtaaatgaagctgctgtgaccaaagtgaccaaaggctgtttagtacctgaaggtcttgggaggccctggacctcatggagagagaaccatagagcgtggggaggtgggggcagaggccccctggggctgagcctgttctgagcagttcacgggggtctccttttttatccttctcctgtgtgcctgcctggggggcttactgtcagctagcgtgtgggggcaaagggcagacaggtccacacaggtgttcagcctcttgcacagccctggggaagcggggatcttagattctcaccccactccggggaggcgggagctctgtatcacatggtcacttctgcccagcggggccagtggctggagctcagcgaggggacttgggtgcaggctgctgtggagggactgaggacccaggtctttatccttggggcaatggatgtcagcacagggctgccgcaggggacttcagtcagatctgtacttggaaaacctcactgagtatggagacgggtttggacaggccaagggcttctggggatcaggtaaggggccttttcccaggtccggggtggaggggtccggggcccggaggtgggtagacagattcaggagctcaaagttgacaagacatgggggctaggctgggggtcaggggaggagagtgaaggaagaggaaacagaaagggtaacaccaaggttcccagctgtatgtgtggggatacggagggaccatggcccgaggctgcgacctggcagggggtctgcttggcgactgtcaggtaggcggttggagccacagatctggaggttagcgaagaggtctggacaatacatattagtggctgggcacggtggctcacgcctgaaatcccagcactttgggaggccgaggcagaaggatcgcttgagcccaggaattcaagaccagtctgggcaacatagcaagaccctatctctagaaaaaaacttttaaaaaaattagttgggcatggtggtgcacgcctgtagtctcagctactcagaaggcttaggcgagaggattgcttgagccccggaggttgaggctgcagtgagaccagatcacgcttgggtgacagaacaagcaagaccctgtctccaaaaaaaaaaaaagagagaaatacgcatatgagagccatctgagtctacaggggagagtgctaagctccaccctacctgtgccagggcccacggctcctgttgagaaatggccttaggaggcctggggcttactgagaggggcaagctcgtctaggagatccaaagtttaaggacatcacctgaaagcagtgtgtgctcgcgggcactcaggcgcccgtctgcggtgcaatcgtggacaggatagcctgggctccaccgtgcttggttaaaggggccgaaggaggccccaggaggtcagctcagggggttccagcttgcccctcctggggggggtggtcttcgttgaggtttggtggagatgctcctggaggtgcacctttgctccacagctgaggctgggcctcacgttgggagcagccggcagcattgagagctgcatttggggggcggggaggcagtaacagcagccacacccaggggcagagccagctgcaccccagccagcacagggcctgcggttggactaaaggctggtccttgggccaggctggctccggtgtttcccttcagctctcaggttctctccagcctttccggaaacctactcatctcccagtttcctgccaagaaaccccattactactgaagtctcagactctcgactgccaggcctggtgggtgaagctgcctccagccgggaagaggccttggaggcgccgggagggcccagcttccccgtgcccggccgcgtggccttgggaaagcccctcagtgctccgggcctccgtgtccctttccacaccatgaggctcctggcatttctcctgtggcctgtggggtgtcactggggcaggagtgggccggctccctggctcccggccaccacccctcagcatggtctgcttggcagccagggacagtctgggcttccacccaaagcgtctgcagggagcaggtggggacgtccatccactgtgctgtgtccaaccgcgtctgtcgtgtttctccacggagagcaccgggcagtcgagggggtgcagggactgcggggcctccctacagacacagtctgggtgcctggcagctcagggacctcctttcacaccctctaccacctgcagatgccccccacatgtgtctgtcctcgctgcttctgaaactccccttgggccaaaaggtgcccctgggttgggtccagggaggccccatgtagctgaaggagctgagatttgggccaaaaacctgcaaggggaaggcaggtgtagggtgtggactccacggcgtcctccaggctcacttccccgatggaaactgaatgggagaactgacatttctgggagaattccggctcctttgaaaaaggcggcacgcagaagacgctcaacaccatcgccaccaggaaatgcaagtcaaaaccaccaggaggctgggcgcagtggctcacgtctgtattcccagcactttgggaggccgaggtgggtggatcacctgaggtcaggagttcaagaccagcctagccaacatggtgaaactccatctctactaaaaatacaaaaattagccgggcatggtggtgggcacctataatcccagctactctggaggctgaggtataagaatcgcttgaacccaggaggcagaggttgcagtgagccaagatcgcagtactgcactccagcgtgggcgacagagcgagactctgtctgaaaaacaaacaaacaaaaccaccaggagatctgcctcacaccttcaggatggctagaattaaaaaaacaaaaacaaaaaacagaaaaccagtgtggtgaagctgtgaggaactgtaccctggctggcagggaggtaaaatgctgcagccgctgtggaaaccagtttgacagtttcccaaaaagctaaacatggaatttccataagaaccagcaactccactcctaggtacagacccaagcaagtatccatccactgccaaattgagaaaccaaatgtcagacatccctcccatggggagctatccagccatcaacaggcgggaagttctgatacaggccacagcgtggatgaacccaaggacatcatgctcagtggaagaagccacatactgtgtggttccagtcccacgaaatgtccaatgggccagtgcccaaggacagatgcaggggagggaccaccagggcgggggagcggccaccagggcagggaagggaccaccagggcgggggagggaccaccagggcgggggagtggccaccagggcgggggaggggccaccagggtgggggaggggccaccagggcgggggaggggccaccagggcgggggaggggccaccagggcgggggagtggccaccagggcgggggaggggccaccagggcgggggaggggccaccagggtgggggaggggccaccagggcaggggaggggccaccagggcgggggaggggccaccagggtgggggaggggccaccagggcgggggaggggccactagggccagggaagagccagtgattgccagtggctggggtttccttttggggtgatgaaaatgttttgggggccgggcacggtggctcatgtctgtaatcccagaactttgggaagctgaggcgggtggatcacctgaggtcaggagttcgagaccagcctggccaacgtcgcgaaaccctgtctctgctaaaaatacaaaaattagtgggcgtgacggcaggcacctgtaatcccagctactcgggaggctgaggcaggagaatcgcttgaacccaggaggtggaggttgcagggagccaagatcgcgccactgcactccagcctgggcgacagagcaagactccatctcaaaaaatgttttggaacaaggtggagttgccactgtacatcatgaatgtgctgaatggcaccacattggactgaacagaacactttaaaatgggtaattttatgttatgtgaattttacctcaatttaagaaaaagatgtcgtagggccgtttgaaacgcacatcagaaggagcgaatttcctgcagagctgagcctcccagggcggccacaccttccccacacgttccctcggcaggttccaggcggaacacaccgctcgtctgcaggcgcttggtggtggagctgtttcacacgcgggagcttctcttccccgcgccagcccaggaggagggtgtcactcctcccttccaaagaccagcgacaggacaggagaagcttctgtgactttgccgggatcagagagagtccaggattccagcctagtcctatcaaccctgtatcttggtgctccacctgccaaccacccagatgcaggggccagcacaggacggccactatccgagtctgtgacctctcccttgtccctgatgtcacaccccacttgctgtggcctctctatgctggtctccacaatgctcagccgtcttcgtccgggacactgcaccccttccgccgcgcagcccaccagctaccactcccaggctgtccaccaggtggcagtgaaggtcaccgatgtcaagttcgtggctcaccctcccagccctgcacccaccctggctgcagcagagtggtgggggcccaaggagccctccaacctcgtcaggccagggggctgggatgccagggaccacttctcctgcacagcaaagcttattataaaatccaaatgcggctgggcgtggtggctcacgcctgtaatcccagcactttgggaggccgagttgggcagatcgcctggggtcaggagttcaagaccagcctggccaacatggtgaaacgccgcctctactaaaaatacaaaaattagctgtgtgtggtggcgggcacctgtaatcccagctacttgggaggccgaggcaggggaatcgcttgaacctgggaggcaaaggttgcagtgagccaagatcgtgccactgcattctagcgtgggcgacagagcaagactgtctctcaaaataaataaataaataaaaatatataaaacccaaatgcagccaacaccgtggctcatgcctgtaatcccagcatgatgggaggccaaggaaggcagatcacttaagtccaggagtttgagaccagcctgggcaacatagcgagaccccatctctacaaaaacacaaaacctagccaggcgtggtggcgcgcatctgtagtcccaactactcaggagactgaggtgggaagatcccttgaacccaagagttcaaggctacagtgatccaagatctaaccactgtcctctagcctgagcgacagagagagagcctgtctcaaaacaaacaactccggccgggtgcagtggctcatgcctgtaatcccagcactctgggaggccgaggcgggcggatcacgaggtcaggagatcaagaccatcctggctcacatggtgaaaccccgtctctactaaaaatacaaaaaaattagccaggcatggtggcaggcgcctgtagtcccagctactcaggaggctgaggcaggagaatcgcttgaacccgggagacagagtttgcagtgagccaagatcgtgccactgcactccagcctgggcgacagagcaagaccccgtctcaaaacaaaacaaaacaaaaaacacaacaaaaaaactccaaatgcacctgagtcccaagtccagtctcccaggcttgacgcaacaagggcagggccccttccagccaagctaacccagcctctcctccagcacctccagccttttggagaccctgccctgcccaaaaccacttggaaatcaccaactcaactttccttggaacgcaccagggcactccaatgacgccgtgtcctagctggagtgcctcggcttttgcaatcctgtgcagaatcaaggttttcccttgagccaaagaatgaagaattacggctgaatccaacaccactggctccagggcctctgaaagccgagtcctgaggccgcacaaaggactctgttggctcctgcagccgcagagaaaatctcaaaatctgagtgagaattagcggcagattccagggatcagcagccagctcttcacaccagcctcgtctctgggcattggagccacgccggcaaaggtcacgtgcagccagttggacgaggggtaaaatgccacccgaatctgtttagagtaattgttttcccccagtggatggaatattcttttcatctgggcagctaggaaacagctaaagttttccatgaacctctacaaagatttctgtgtcttccaactttgtgagaagaaaaagaacttgctgggggaaatgatattctcgagcttaacactcaaatcatgttttctcgaaatcatgttactttctggccaagtatgccggcgaagccactgagacacgctccgcacatctttagaacataaaggccctggcagtagcttgcggcgctctttggaaaactgcttggctctcactggaaacacagccacgcctcctctgggccccggtagctctggcgttaagtcggctggagactggcttggccacggccgccatctctagccagccctggggcaactgcccccggctgcgtcccaccctgcccgcctcctagcccctagccagaggcagctgtgtggctccgtggctgggctggggcgctgcggctctgcgcacgataagccagggagctccttccttagcactactggctccaggagcacctatttaggtaaactccattcctgcaggtgtcctccccgctacacatccagcctggcccctcggccagttttgccttcaccctgtgcagttcatcaagacatccccctttcatcaaagctcttctagcacattctgaggcgagccatagagggacatgagggtagttacgtctcatcaaagagaaagggacctcatatttctggagcacctaccatgcacacgggctgactgtgggctcccatggccggtgggacaaagggccccagctgctgtgtggtctgatgctgtgcaaatgaacatctgtgcgagtggccacgcttccccatcggagcagccctgtcgggtcagcgcggccagaaagctgcgttgcacttcccctgttagggtctaaggtggaagaccccttccagatgtccttggtttctagatggacaagaagaaatagcgtgtggctctcaggttaggagaaggaagcagagtgccaggaagagccgggaaggaggaggcaccagggcacctgaggctgtcactgttccacctccgggggtacacgtctggaccactcatgacaggccccactgcatcacgaccccagacaggagacggcagggcagcctcagactcccctgcctaagttcaactccgagcaccggggcaggcgtgcttcctgcatgtcactggggaggccatgctctctctcgtgtatctggactcacgacgtccacccggctcgtctgtattccgtctgggtggacgtgacactgggctgctccactgggaaaacactgaccagtcatcggaatgtttacggagacagtgtcaggcagcgggccagggaaactctgtcctcgaagtcccccaccctctaggcacctaagtggggttttataggatctgctgcaagaagataaagtgagattttagggctgaagacaacatttcaaaatctggctttaaataaacatggaataaaagagagagagagagagcgcgagcaagagtgagagcgcggagcctccagcagctgaaattagaagcagccagccccgggcagggaagccatctgcgcggcgcccagcagcatggagacgtctgggtcctccctgacggcatgcgaagcggcacccgcaggtacagctctgctgtctcctgtctgcagggacctgcgggaacacactgaggtcttgttttccaggtgtcctccaatttcagattctgaagaacagattccctccgctcccatccagaaatacctttcagatcactttcaaggcagtttaagtcatttaagaagcagagtgataagaaaacaaagacaacgtttcaggcggtaaatgaagactaattatactgagcgttaagcaaagttcgtctttcttcgtctttgctcagggaggttgagccgagtacggcccccagtgccaggaggggccagtgctcagtgtcctcacacaggtccgtcttcctgctcacccagtcactggccactctcaccccatgctgggttcagaagatggcgagtgggcctgggactggggcgggctcccactcctgcccggggtggtgctgcgttgtgggcacccgtgtccctcctccccctccaccctgcccagctccagacgtgtggctgaagcggccagctcggccagttcgtcccggcgccacatgtgtccttcctccggccccagaccccagcctcacctgggccagtgcaggagagcccagctacgctgggtgcgcttcaggctgtcacctgcccgagttatttaaatccacattgtcagctaatgtattctaataagcaagtgggtgaccgggctggcaggctccggatgacgctgacatatagcaagggggggaggagcacggagcgaaactctgagactcacttgcgccccggtgctcacccccgcactgcctcccacaggcacctggagtcacgccacgcgatgtgagctggattatataagggggcttgttgctggggaacctctccccgcccacccccgccagggcaggctctggagggaggccacatgtcgtctgtccccaccaccctcagaaggaagcccctctggcctttctggcctggtctgtagggaagctctgtctgtaggccgcctcactttgagggctgaggctggaccacggcaacacagggtcaggaagggcccgagaggccatgcccacactcctctgcccatgtgttgctcagagcaggcagggtctccctgccttagagacagtggcctcatcctgtcctccagaacttcctccccatcacgggccacgtactctctgcgagaggagagaggggacatcagatgcccggatgggcagcaatgcatctccctggctatggccagaagtctggccaacactatggctgcaggacagccatgagccacgctgggttgtgggcagcaaacccaaggcaccatctgccaaggaggccaggtgagaaccacgtctggggtggcagaagggctgagccgtcagcaggaccctcgcgcctcacagccccagctccactgcgggcagtccagccgcagccacagacgggggagggggcgaggtggggggcgggcccacgtgcctgtcctcgggataaggggccactccacagggtgctggccccctggggctctctgtgatcagcagcagcagaccacaggggcaacagctccatccactgaccccaaggtggacagagtggggacctgggggccaggacgagattccagggtgaggcacaggtgacgccttcggactcctgcaggtaaaactggaggcctgtgcaagatcactgcccattcccatgacaaccttaactctagcacatttttcattcatgcaattgttacaaagataccgccacccccccatccccccagcccagttttccctttggtgacatcttgcatcagtacatgtgtttatgatgatcaatgaatcaatgctgctacattattattaactaaagcccatactttattcatatttcctcagtttccctccaatgtcttctttctctcccaggaccccacccaggatcccacgtgacatttagggatcagctgtctccaggttcctctaggctgtgacagtttctcagactttgcttggttgttttttggtttttggttttttttattttgagacagagtctcattctgtcacccaggccagaatgcagtggcatcatctcagctcactgcaacccccgcctcctgggttcaagcaattctcctgcctcagcctcccgagtagctgggactacaggcgcctgccaccacgcccggctaatttttgtatttttagagatgagatttcaccatgttggctaggctggtctcaaactcctgaccttgtgatctgcccgcctcagccttccaaagtgctgggattaaggtgtgagccaccgcgcccagcccactttccttggttttgatgacttgggaagttttcaggagggctggtcggtttttctgtagagtgtccccctgttgggatttgcctaatgtttcttttcttttcttttcgagacagggtcttggtttgtcgccaaggctggagtgcagtggtgtgatcacagctcactgcagccttgacctcctgggctccagtgatcctcccacctcagcctctagtggctaggaccacaggcatgtgccatcacgcctggctaattaaaaaaaaaattttttttgtagagatggggtctcaccatgttgcccagactgctcttgaacaatcttcccacctcggcctcccaaaatgctgcgattacaggtgtaagccactgcgcccggtctgccagtgtttttctaatactaagacaagggttatgggtctgggaggaagagcccagtggtgaagcgccctgtcacatctgcccgtgtgacctctcggtgatggtgccagccttgacctctgggctgagacagtgggtcgggctctccactgtggagacgccttgcctacctcccactctgtgctctctggaaggaagtcaccatgtgcagcccacacagaaggggcacgagctggggccccctccctgtgccccttacttttatttattttgagacgaagtttcgcttgtcgcccaggctggagtgcaatggcacaatctcggctcactgcaacctctacttcctgggttcaagcgatcctcctacctcagcctcctgagtagctgggattacaggtgcccaccaccatgcctggctaattttttgtattttcagcagagatgcggtttcaccatgttggccaggctggttttgaactcctgaccccagttgatctgcccgcctcagcctcccaaagtgttgtgattacaggcgtgagccactgtgcccggccgggccccttccttttaaatgtcagcctctggagtgaccatctgtgttggctgggagctcttcggaatgtcccatccagttgctgaggctaatgatcacctctcaggtgcgctggtcccattctctgcgctgtttatgtcactttatgcctggactcctcccaacaatgttctgtcctccacttagagggtgctcagagaggctgtgacacctgcccccagcaaccagccagtcatctagcccagtggcccccgggcccgcctatgccaaatgatgccccctcggtgccgcccacccctaaatgcacaccatgcctgcagacgtcagcactcgccctgtcccacttgccctggtgggaaacagcctgcagtgaaaacgtcgctctgccttttatgctggacaaagccgaagtgtgctggaggtggctgagccaggcttcccgcggcaaggagcgggactcctgaccccacagccctggctcccaccctcgatgtgctcctgcctttgccttcttgctggtaacgctgccattggtgctggtaacgctgccattggtgaagaacacgggagcccatccagcccatccaggaagcaaagaaacggtgctccagacaccatgcggatagcttcacccgccgaccccggccaggcccagctgctcccacagcacctggcatggagggggaagtgagcaagggcaggcggggagagaagaggctcgccctcctggctctgccccagacacccgtccgatagcactccagtgccttccggtctctcccgctctggaactttctggttactgattacaagtgctttaatccaggaatgaaaaggaagaggagttctgattgggtggacccttctcttggagagaaggcaaagctgccaggcagaaggtgggagggggaggaagaggagagaggaagctcccttgacaggcataaaacgtccctgtgattgcggacaagtggctactctcaggccacattcagccgaggctgggtgaggctggtcgggaagagggagacggaggtggaagcgggttcaagttttgacgggtggtcacctcagaaagggctccttctgtttagcaaaactccccaatccttcgcctggcttgccaggagaacagcttgcttgaaaagcaaaggctgtcatcctgtaattaaatctgagacccccccccatgtgacgttgagatgaagccacttacataacgcgactaaaaataagctgatgaaggctgcacacttacactctctgcctccagccctcctctccccagcggcccatcgtgctggctgacccagggtccgcgtcaccggctgtggcgtcgggttcctgtctgaagtcactcttgcctccggccccgctcggcgccctgtgtgcatgagggcccatcgctggtgcccgggttgcagacccctggctcagagctggggtgctgaggatcccccagcccgcccaggcgagggttgacgcttatgagaggagacctgctgggtaccagctccatctgcctccttctcagtgactcctgacgagctgctcatttacacacacctgctcccacccccaccccacagtctggattgcgaaacctaccgcaccccacccccagtgcaggaagaaggtgaccctggtctggggtggggacagagagtctgggagggggtggtggctggcagtctcggtggctggcgacgcctcttccgctcttccttcctgggaggaggcgggcaaggcgaagcctctccgctcagtcgatggtttccttcaggacgtctcatagaggtgtgggtgagatcccaggtctgggccgcaatttctagccacgctgcccaaccttcaggcaagcagtcaggttccacagctaccccaccacactctcagagtcgaggggaacaagaagagggagtggtctgtaaatgcgtcgggacaagagtgccctcctaactccacctggagctggcgtcagggcgatctctggatgcccagcccataagcctggcctgtctcttcctgggacccttggtactcagcacccccagcccccaagccccctaataccctttagaaaggcttccccatcagtgtgaaagacctcacaggacgctggtgaaggcgagcacagagtgcctggggaacatccttggtggagaacttcctggaggccactggtgcagggcagatgccaggcgggcaccgagtttcttgcccttgttctgcattcctaggtatgaggacctcaccacgtcctgctctgcgcctgtcatcggccgcggtgtgtctcctcaggtgccgagctggtcacttccatgtacagcatggataaccgtcttctcagggaaggcctccagcccgcattcagccacctgcccagccgccgggcggagggagcaggctcaggcaccgagactgctgagccactggccacccgggaagcaggctgcgttctgagtcggtcaccgaatatgtccccccttggacgggagtagcgcaacgatgtgcaggccagctcaggaagtaacgctgggagcttctagaaggtggagcgggatccaggaccgtgggagcttttccggagaagcctacctctcctgtgttgcagctgatgggagcagcagggcctggagaagaactgtccccaggctgactcccctcttggagtgaggaggcctcccgtgtttgcctgccagcctccatctgtcatcttggttccagccattcaactttcctccaggcgagcagagctgctctacccccacctgctccgtgttggccccagacccaactcaggccagtggacgtctgtcctagggctgcgtgtgagatcggtgggtgcagggaacacagcaggaagctggcctagaagaagggggtcagggtcagtggagatgctcctaccttcaggtaaatgccctcatttgttagggccagtttgagcgagctttctgtcatttaccaccaaaagaatcctagaaaataaatacacagggatctacccccaaacactggagacaataaagaaaaaggaagcagccagggccagtagctggaaggaaattcagccggaggagaggaggcgcggggctgtggtgggagggaggcaatgcttcctgaatcttacttccctggtctttccatcggcctgagcccgtgccagtctggggatctgccggccagccagcacaactgcgtctcccccaggggcctgactcgttgaaggaatgaatgaatgaatgattttgcagggatgggaggctgggagactgagaggtttcattaaacggaaacgctcagatctggtgtttcacaacgtaaaacaaataattcctctatgttagcctaatttatgtaaatatttctccacgggaattgtaccgggagacctgtgtgccaactcggccagcttccccggcagaatctccccttgggaggacccttaagcaggacccttcctaaaaattggaggcagctctgactcctccattcctcctacaaggttcccccaccccctagggctttccaccgcatgagagtcctccgggcccctcgtttcctactgccctcgacccttccttcccgagacctctctctctcagtaaactgcctccaacgagaatcttctgacggcaggagggtcctccccgtccctaagggtcgccctgtccccaggccttccagcaggacactcccctgtcccctctccagatcctccttcccagggccctcctccaagatcctcttccccaaccctcctctcccagggtcctcccctctccagaatcccggccccaagcccccaagcgctgtctgcctgtctggggtcctccccagagttcaccttctgcaggatcctccctccaagtcctctcctcacgatgctcccccgaaatcctccttctccaagtcgtcccccactccagggccgagctctctccagggtcctcctgcagcaccccctcccccagggttctcctctctgccccgaggggccggccggggggtcgccgcccgcccggcgggcttacctgcgaagcggcggggtcggggcctctcccacctgtaagcccggcccgcggcgtcctgcgtccgagccgctccccgccccgcagcgccaggccgcgacccggcgggccgcccgccccgaagtgccacttcgcgaagtgccgcctccacgcgcgctgccgccggcgccccccgctctcctccccgcaccttctgctccttcttcctgcgccaccccgcccccgcctccccgcccccagcccggctgttgcccgggccccctcaggctgctcccagggccccagcccgcgccgcgcctcccctctcctcccccaggatcgacgccgccgcagaccaatcgctgcctggagtcggccactaggccccacctccgatcccgcccccctcccccttctccggaacccaccaatggaaagggcggtgcgggggcggggcctggcggttgcctagcagcggcagcgccgggcgggggcgggtggtcgggggcggtgatgcgggcgcaacgggggcgggacgcaggggcggggactgccgcggggcggggcctgaggcggctataaaggtggccgccgccggacgccgggctctgtggttcgggtccgctttcgtctccgtcctgctgccgttaccgccgctgctgccgccgcttgcgtcccccgctccggtctgtggtgcagccgggacccaggaccatgtctctgtctcgctcagaggagatgcaccggctcacggaaaatgtctataaggtgagcgccccccggcgccgagctgagcccgctccgtgtgcgcctgggtcgcgcgccgcccgcgcgcccgagcccgaccagggcggccccggggccgcgcgccgggccaggaggctgggactttgggggtcttcccggcgcggccacccgggacccgggctgctggggtggtgagcccggcgccggccgctcacaggtggccacccccgcccgggcccccccatcccatgcgcgccgcggcccggtcagtccccagccccaggcccggggagcactccccgctccgacggccctgctcggcccccgcgcgctcgccttggcgtcggcgggaacggagccgcgcgccgggccccggaagccctcggaccggtcggggtcgtagcacacccgggcagggccggggcggcgggggcggcgggcccaggggttgcggcggccaggacggcatgggggctgtctgaaggccgcggtcggcgcggtggcaccgtggggctcctccaggcgcggttgcgcgagcctcgggcacttcattctcaacaggctttcccttcccacaactcctgcccggcgcccatgctggggcctaaggtgggaggtcggagcgcgggcaggctggatgggtggacggataatctatcatcttatgtaaccgcggagagagaagactaattgtgtaggaggctgacgtgcctgcctttgcttcagatgtgttaagagtggcatccacgttctcgtctgcgaaatgacaggttcacatccaagggccgcagagcaccgctggaagcctcccctgccgccccctccccagtcgtttttgtggctgggataccgacaaacaggcccttggttttctctttcttcagcatccgttctcggtccagacccccacgcctgagcccggcagctgccggggagcattttctcagaggagaaacccctgctctgggtgtccctgggtcctgggcgatctcttacagatgtgctttgtttcaaaactgtctgcaggttcagtgacaggctgggcgatgagtggagtgggtatttacccggcagtcgctggttcatgtttcctaaccggcttgcaccctgcccggcagagtaactgtttctgattgtggtaggcggccaaggcgtgcctggccaggggcctgggaagccctcttagctctcaggcttgggagagccagatggaggcttcaggggtggcccctctggttccagctggagtgcagggggccgattgcacttgaatacagctttcaataaagcttgtgaagttggggccgcgtcagtctggaaggtttctgaaggcgggtgtgcggtcgactagatgagtcctaaagccacgtcggagccactgggaaacaggattcagggtgacctgaggagtcggcttgggaaaggcacaggccctggggttgttaggtttggtttcacagagtctgtggcatacggttctggccttgttgctctgtggaagcacatgttgtcaagggagggaggtttattaaattattagtcattagctccattacgacttgtttgtgattgcagagggtggaagagaagtaccagcggaacctttttcctattttttctccttctgcgctgaaaccagaaagcaggaactttcgtggtgagagttggcagggggtgagtacatggagtggttttgctctgggggaccgaccccgtgatcgtccttaataaaactctcctaaccgggcagtaggccttcacctaggtgaagctgtaatttatctgcaggtctaagtgaaatctgctggcaggaaaactcttaggactgagtgtttggggactttgagcccctgtggacgcagaccagctggtctggagcacgtgaaacacacaggttctgcgttttgtcttccacgggtgggttaattggtgattttcccaagtgaagatgtggcggttgatgatttgatttagcacggcaggacgcggtgggccgcaggtgtctgaagggtcgatccactctggaaaggctttgccctggtgacaggcttgcgctgctgctgctgcacacaggcggggttggttttgtaggtaggtggctcctgctgccactccgggagcctgactgctgagtctttgagacctttttgtgctttgtcactggggagctcaaggtgccttggtagtgccggtactggttgggcagcttttggcaatgtcagccaggcagaaactcagcccacatggagacatagtcaggagaccgctgaggccaccggtgtgcactcctgggccggtccagccggtccaggcagtgctgagctctgtcctctcctgggacggtgctgcctctggcatcccttcccggggccgctcctgtgcctgggttggcggcttgcagagccctggcagtgcctcttggaacggctgtgctgtggcctgcttagtgtcacccgcgatgcggctcagctgtttggtttggtttggacattgcatcgccttaactgcagttctgagtggtgtttgccttggcaaaggaggacgcttgtccttggccttggtgattaaaaatgcgagaataaaaagtgcagttttgattttcttccccgtaagaatccgtaacgcagactttgacctcttttctggtggctccattcccttgggagctgtgtcctcggggaatttcatggaagatgaaggggaggggagtggaacggcttcccggtgtttgccgagaacataatctcagaccttctgggggcactgcgtgggctgggccctgcaggtgttgggagggcaaggcgcggaagaccccttcctccacaggagcccgggcccagcgcttgctcaggttgccctgggtagtggcccagatggagggatggagtgctggaatctgcctcccccggtggcctttggaattaaggctactgaagctgcagccctcttggggaagccccgtgcatccctgtgtgctgaggggctggctccctggctggctgtgtctcctggaatgccaggagaatgtcaggtgggtgttttcctcaaggtctcgtgtccgcagagaagccctggctcccaggtgacccatgacctggagtgtggcggctccaccaccttctctgggcatagtgccattggcccacagcctgtcctagaatatgtgaggttgagagagcatctggggaggaggaggagtccctgttgcagacgtggccatggccttccttgtgccgaggctcttggccctggctggtcactctagcagctggtggggaagccagcctggcggggccgcagccgtgcttcgaggagacgggtgccacagggttcctggagccaggagccagttgggtttgccgcctctggtgtgattggtaagggctggcgccaggtggtgggcgtcatgtgctgggtggcagggagcacactgccggcttttctgctccgtgcccggctgcccgggcctggctgttcctctctgccacatccagcttcttcctggggtgtgcagagctcaccatcccctccatttggagacggtggggggtggtctctgacaggcacctcctgctgacaggcacctcctggcattggagtcgccttcctgggtggggggggcagcagacccggcacctgaggaggagagaaatcacagtgctggacccagctccgtgcgcgtgtacatgtgtatgtgtgtccgtgtgtgcacacgtgcatgcagtgctttgtgtttaaggatacttcctggggtggcccccatgggcaccatcttgccgcagggtggctgggtctgctgtcactgagtagacctggcctgcattttctctacatgtgcatgtctgtgttacccgccctcgccaccgccagcctttagcagggggcacgtctcccaggagcagtgctgatgtggtccccttggtggggtggccagggcacaaagaccggctgccgtgtcatgctgccctctgggctgcccagcctgtgtgggctttggccccaggcactgtcctgccggttgttggctccagggtgtacaacccttctgctggtgcttgctcagcgtcccatgcctgctggctccaggtggcgtccagcgttcgcttggtgtcccatgcctgctgtgccgttggtggctgcatgaagtccgtgtctaccgatggatgtggccaggcgttctgggatgtggcgcttgtggagttgtgggctgcttgggggagagtgtcctgcccgtgcctgctgtccccacagccttgccttgagcaagtattcttcgttggggagattggttggctcgtggtactgcccgagtggacctgaggttcaggattaaagtgaaggctggtgctgccctgggctttcaggggccaccgttagatgggagggcagtgggtgggggctgctgggagctgtgttcctgttgctgccttgtcttcgactgaagcttccaaaggtggagacctgagggccaagacctgtctgctggctacaggcaccatgggctgaactgtccaggataggtggtcttgcaggggagggctggtgtgtgacctggccattgaataggaggggcctgtcctccttccgagctccaggaggcagactggccgggaggctgaagcccggttcacccttctccccagttcacaggtctgggccctggtcaggggagcaaccccagcgtcactgcaggagtggcaggtggtgagcagagctggacatcaccacttgtctccacccagccttgcatggccctctctgccagctgccctgggctagtgttgcctgtgggtgccaccatgggtggggacactcgccaccgtctgtggaggcggggtgccactgactgctggttgaggctggctcctgtccttccttacattgagccagagtctgccctgtgttgccttcccagccaccttgtctggtgactttctttgaggccccaggatagggaagcatctttgtggctgcacagagcccgtggtcccctggaagctctgcacttgggcggccggcgccgtcagccgccccccacagcctgcgctaagatccctagtaattacaggcaggcggggatggtgctggcaccggcctccaacgcacttccacctcccccgagcgctgattcattcctggcccctggctgtgcctgtacagctgcacaatgacttgaggggcctcaacccagaggcagaaagggaggccgagaagggacccgtttggctctgtgactgcaagggcttgatctgtcctgcccacggattcctcctttgggcatggaacggcggccagcctgtgaggggcccatcggtatttgggaatgaacacatcttgtttctggattctggagcattcatgcttgaatcactgtcccgcctttgctgagggtttgctccccgggcggtggcctgggccctctgagagctccctggaggtggtggcagctcacaccacatgcagttggaatccctgtttcccagggctgtgggcagtgcaggctgaggaggtggccctggtgtggggctggcctaggcaggctgagggctatttctcctactgtggcccaggggctcttggtgttggtcctgcaacaaggggaccagaaagcccagggagcaagagtggaggaggctgtggagatggtggggaggtagggcctgagcccatgctgtgctgaggagtcccctctagggggcaggaggctggggatctgcctctggcgggggcccgtttctgcctgtcaggcacagtggcgcccccagcacctccctcaagttaacccccatctgcccctggtctttttgactcacgctatagagccttgtctgctggctcttggtttggtcacccctgagctttggaaaatgctgcctggtccttgggcttcctgccaggcctgccgggaggagtcttgcctggccagtcccctggccatatgaccttggccaaatcttgctccctgggcagtgggtacagcgggcaggatgctcccagggtccctggaggctctggggcctgtcccaggtcaggtggcaccagccttggtatcctcagtgctctagtcctcactctgatgggcaggggtgggatgcacgcggcaccatgagatctgatgtcctgggccatgaggtgctggggaccccttgttgggggaaaggctgtcagttacaacagggtgcttttgctcttgcttagagtttttattttatacttactggaacagttgtcttataattgggtagtgttttttcgttttttgtttgttttttgttttttctgttttgtttttgttttgtttttggagacggagttttgctcttgttgcccaggctggagtgcagtggcgtgatctcggctcactgcaacctccgcctcccgggttcaggtgattctcctgccccagcctcccaagtagctgggattacaggcatgcgccaccacgcctggctaattttatatttagtagaggtgggatttttccatgttcgtcaggctggtctcgaactcccaacctcaggtgatccacccacctcgggctcccaaagtgctgggattacaggcatgagccactgcgcctggccctgtttgggtagatttttcaataatcatatattgaattcatgtgaagtaaattggtagggttttcttaaaacttatttttcatgaagagtttgacttctgagtcacatttcagctctgggctgtcagtgtgcttgtccactgggcacctgcccctgagccgtcaggggtgccaatgccagaacacctcctgagtatgtctctgagattttcttccaagcccctgctcttccatttttgttactggcacttttttttttcttttcttttttcttttttttttttttttggagacagagtcttgctttgtttcccagcccggaaggcaatggtgtgatctcacctcaactgcagcctgaaactcctaggcttatacagtcctcctgcctcagccacctgagtagctaggaccacaggcgtgccccacctgtgtgcctggctaatttttttttttattttaatttttggtagagatgaggtcttgctatgttgcccaggctggtcttgaactcctaggctcaagcagtcctcccaccttggcctcccaaagtgctgggattacatgtgtgagcaaacgcaccctggtgctttcttgatcagcaggttttcagacaacggccaggcctcctgttccttcttcggatggtccttatgtgttttgtacactgagctgtccaggcgtgcccctgcctggttgtggcaggggacagtcagcaggtgggccatgccaggtgaccgcctgcttgtcatggctgccccagtgggagtcgcaggacgtgaatggtggaatgcgctggggtagcacaggtgcctgtgccggaaaacagcgacatcttgacattagaatgggggtggggatggtggtgggggagagggtgtcccctagccgcaggagctggaatctgtccagtagagggtttgtctcacccagagccaagcttggtctgggtggatgctgctagtggcgggcagagtggccttgctgcttccaggcggggcttttattttaatttaatttaatttaatttatttaagacagagtcttgttctgtcacccaggctggagtgcagtggtgtgaccttggcttactgcagcctctgcctcctgggctcaagcaattccaagaagctgggattacaggtgtgcgccaccacactggctaattttagtatttttagtagagatggggtttcaccatgttgcccaggctggtctttaacacctggggtcaaatgatcctcccacctcggcctcccagagtgctgggattacaggcgtgagccactgcatccggtctaggtggggcttttaaaccagtgggtgtggtggaggccgagatgccaccacctgaaatgaagtggacctgggtccccccatacccgtttttccagccccctcttccgtggccgactatgtctgccagaggaggcctgtgtccatctccatttgccccaccacggaaagcccgtcctcacgcagtccaggcatggatggagcatcagcctccacctgtcctgctcctgggctgagactccagggcctcggtggccccaggccgtggagcagagctgtgggctgcggtccgaccggtggcaggagtcccatctagggatgtggctgtgaagctggggtgctggggcctgggcggtgtcactgctgtctcatgctctggctctggggacggctgggcccacagcgtcctggcacccgggaggccctgtcactgctcacactggagcgtcctggcacccgggaggccctgccactgtgcacaccggacactgcgctggacattctctgtgctcagcctcgttactgttgcttcgtgtgcgggtcctgggtgtccctgcctgacaggggatcctcggttcagggagaagtgtgtccccgcccgtaagctggagtggctgagctcattgaaactgcagagccaactccagggccctctggctctccagccgcgcgtctgtccttccgttcgggagttcgaggagttcaggaaggcgttctcgccgcggggtctctgttttctcattaattcagtgagacgatagcgtatttcctggcacagagagtactgggtaagtggtggccacgatcgctagcttgtgggacagaaagttcttcagagatcagaggtcagtggtccagagcaggaaagccccgccccgaagctgcttgccactgtctgctttcctgggatcctgtgttcctgagtgtggccacagcccccgggctggcacctcccacctgcctgacctgaggttggcgggaggtggggccgtacaggcattcctaagctgcctccctgcttgctcagccacggttgctcctccagccgtgagcccagcccgaaagaccggccagtgccttcacagggaggggatggatggggcagcggcctcggggattcttgcaggccaggcggtgaccagacttgggtctgcgattggcggtaatgagtgacctagtgaccgggcctttccacgttggagggggaccaacacggcgccacagactggtgtgcccacaggacggccgtggcacctggctcgtccctatgttatctgtgccctctttcttgtaaggcgctggtcctatgggattagggcccgccctagtgaccccagttacttttatcgccttcctaaagaccctgtttccaaacacagttgcactgcgcgatgccggggcttagaacttcaacacgtgcatcttgggaggggacacagttcagccgtgacacccagcggaccccacccgtgacggagtgcagtagctgctggaggggccgagtctcccatgttgcctggaggtgaccacctgtctgtcttcaggctgattgtattacgagcctatgatggttttcccttccaacctcagtcagatcgcagcccgcagtttatgacaacaggaaggtttccacggggacagctgattctattggacgagcagtcagctggcaaggcgccagctcagtgctggccacaggcgaaaggcagccggaatgcaccgtcccgtgtgggccggacaccccgtgaggctgagcagttgctaagttctgtgacccgggccagggtggctggacattggaaggtgtgtgtaaggggctctgtccccattgaagctgggataggcaggatgtgcctctcggacaggaaggaagtggccagactgcttggtgctgtgtttggactttgctgggctgcggctcctcctgcgtgggccgggtcatggtgtcctgcgtgcaaggccccacgtgtggcttttgcccttgtggacctctgctccttgggacctcgttcaggagggctcagacttggggcccctgagagttgaggacgccaggggaaagctcgcagagggcgtgcaggtgtccaaggcccatggaaagggagatgctgctgcaaccctgaaagggaagcagggccccaggctggggctgggggcccaggggaatggccgtgtggcccttcccacaggcggagggcagaagcgcctggctcaggagctgaccttagtgttggcatttgtccctgttgtttttagctgcagcattcatggtccctgtcctgggacctcccaggagcctggcgggtagggcaggcagcatgagggaaggagtccctgcacctcgggcccctcctggcgggaggccacctgctcctggtcatatctgggcaccgtgccaaagacacaaggaatcactttattatgatgtggatggcttttctgtgggtgctcctggaggctgagaactggagctaccaccttaggggacatcccagcccctcacgctgatcccaccatgacccatggccaggctgcccagggccctgcaggagtccctggtatgcgtgggacctgggtgtctcccttcggtcttccaggaggggctggggtgtgccctccatctgtctgatctgagtggctctgggggagtctgggtcagccaggccacgccgaagctgcccttggagaagcctagtggcccctcctgaccccccggggaagggtgggggaccagccccctctgttgtggaacaggctggcctcttcctgcctccagagaggtgcctgcttcctgacacccagagccctctgcggggtctcatggcctgggggggctcatggtgggggcccctggcacggcagaggggtttggccacccagttttcttctcccctcggctgtggggaccctattaatactcacagggaggcagagctgccggctcctgcacgcccagctgcagggggtaaggaggaggatggtgtctctgcctggtttgtcaccgtcccccttgggatcccgttctgcaggctccagcccaccttcaggcccccgtcctaaccctgcgcgccgtttcctcccagaaacttccatgcatcccctcgtttcctaaatccgtgtacatgtgtttgtagtttgtctccgactcaaaccaagtaagatgcagttcaagatctgcctcctccaggcagccctcccagctgtgctcctggagttggttttcttccttcaggaaggatcctccaggacagatgtccaagtgtttagaggggacaggactgtccacaccactccagccaggcttccttcacacccccacagcccccactcctcttgccctgtgagccagctcccaggctctggagctcatcggtgctcctgtgtgtggggtcagcagtggcccgccctggaggacgctgccaccttcccgatgctctctgcccacagaagtcccccaacccccctggcagccaagggaactgagcctgtggcccccggacagcaagctctgaggtgtcctcccgcgaggacactgtccactgctgcagggcccctcctgtacctccctagtccatgctgtacatgtggccgggggtttccaggcttggctctgtcccgtgcgcccttccctggagcctggcatcctaggcagagtcccgtcaagtctacgtggaccagagtcgtgggtgctgtgaggtccgtgtctgtgtgtggggtcctcatgctgtggctgtggtggcacagcgggctgggggaagcccctctggcactgccggccccgcagctgccaccggcttctgcctgtcgcgacagaggtggaagtgagggcggtggtccagtgggcaacagcggcctggcccctcaggagctgtgctggtccgtgggcgagggagtgggtgggcagggcccctcccctcaacagtcagccaccctgggcattggccctcctgggagaggccaggtggatcgagtcaccctttttcctgatattactggaatgtggcctttgggagcatgtcaggtgcaacaccaggaccaattgggagagagggaccgggctggctgtgtggtcagcagggttgaagccaggactctgggctccaccaagagctgacaggctggcccctgccttcctgagcctcactttcatcttgtccagtgtaagatgggacagtgactctcatggaggggctgggtgaggattagggtgatgagggtctaaggcagccggagagggtcctagcatcgactctttctctgtttgttcttctgagtagatagaaaacacggctcagcctggccacacacagacacatgtagcacacacacaggtccacgtgtgtccagcacacgcatgagtgcacatgcacaggtaaacacgttcatgcccacagcacacacatgggtccagctcatgcccacagcacacacgggtccacgtgtgtccagcacacgtgtgagtgtacacgcacaggtaaacacgcagctcatgctcatagcacacacacaggtccatctcatgcccacagcacacgcacgggtccacatgcgtccagcacatgtgtgagtgtgcatgcacaagtaaacatgcagctcatgcccacagcacacacacaggcccagctcatgcccacagcacacacaggggtccacatgcatctagcacactcgtgagtgtacatgcacaggtaaacgcatgcagcacatggccgcagcacacacacggatatatgtgcatgcatgggtccatatgcacgcaggccctaggggtgtggccatacgcgcccaccctggcatctgccttgaggggctggagggaggtgggggacactctctgtcagcagagagactgcttttgtttgtggccatcctgccaggaaagcgctggagaggcggccagcgtcacaggaaggagagccaagggataaacagaattcctggccgggagcagtggctctcgcctgtaatcccagcactttgggaggctgaggcgggcggatcgcttgaggtcgggagttcgagactagcctggccaacatggtgaaaccccgtctctactgaaatacaaaaattagctgggtgtggtggtgcacacctgtaatcccagctgctcaggaggctgaggcaggagaatcacttgctgagaatgcaccactgcactccagcctgggcgacagagcaagactctgtctcaaaaaaaaaaaaaaaaaaaaaaaagaattcctgagcagacggaaggtggaccccagcacggcccaggagtgggcaggagagcaaagtcctttggcagaggtcctttctgtaaatgtactggccactctccctttgttccccaagttgggaggaggtggagatgacgggggttttgctgctgccttgtgcccacactggccaggccggcccgtagcactgaatcataatggccatcagtctccaggctggccagcagtgtccagcagctcgccagccaaaagggctccctgggctcatcaatgttctctgacggccacctctgcaactgatggacacggccctcccatttgtaccttcagaaatgcatagctggggtccctgggggctgtagtagggacagctagggtccctgctgtggtcaaggcctggattccatgcgactccagggccactgggacatccgtctctgtggacgtcccagcaggagggcagccaagcgtgcgggcatccctgggcagggacccctcctctcccggcacttcgcggcatgcgtcctatgaggggaagccttccatggcgtgtgtgggagcccctcgtgggccggaccgccttcatgggcaggacccccttcataggcaggccggcccaggaccccccctggggtgggaaaggtgttccctggtcaatagtgaatgaacaaacgaggaactggaagtccgtgccggcccgggaacgcggcccagggagccagtgcgtggtcgccgggggcacagcagagctctgcacgcgccgggctgcgtttgtactgcacaggtcctggagtttgaggagtgtggtggttgctcatggtgtaggatttctgtcctggcaggggggcatggggtcacagaacgtgggcccctggggagctctctctgtgcctgtggccccccaggagtctctcagttttgctgtggtcttgaggatggcacagcgtgtccctgagcgccctcagtgtggacagctgggcttcaaactcacttcagagccgccgtgtgggggtggcgcctctgagggcttgaggttattttcttgtgcggtttctctctcctggcctaggtttttctgggttttttgcacctcttggtgttgataagaaacaagctcccttccccttttaaagcccacagactttcccgatctcctccccatcccctgccccagcactgtcagggcgtctgggcgtctgagctcagctccttcctggtggcatcctgcaaaaagatacactcgctcagtgactcggaaaagccacgtcggtgtggctgagaacagagttctttccacctggggccgctgctgttggttttcattccggaagagctggagctgcctgtcactggctcccctgcccccacctggggacccccaggcactgcaaagtgcctgttggctatgggcccccggaccaggaccttggcctgattaggggagccggaggtggaagtggaggcgggactggagtgtatgccccacagtgggctctcctcaggctggggacttccacacgggcccactgggtcaggatggcccgtgcctgtgttctaggataatgggatggactggttcggaggctcagagagacgcctgaccagacgcctgactggagatggtctcccagcagaggggctgggctcttcaggggccactgggctcctcccgtggttcctgggagagggaggaacccggaggaggggtgggtggcacctacagtgcgtgcctgaggcagggctccacagaaggcctctctgctggcccagcggctggatgcagatgcagaaggaggaactggcccttccgcccgcccgggaaggggagtccccccttacaatgttggctcagtgggatcgatgcctctgccattgccttcgggccaggacagcagcacttgcgtgtcccggccgccgcccctctcttgcagatggaggcagggccgtgcccaggtgtcctggtggctgttccctgcccgctgtctcctgcattccttccgtgtgagctcagctgctgcactaaggaagcgaaaccttggtgctgccccgtgcgtcatgcggtaggcatggccgccgtgctgacccgccgtggttggccctgggtggctcctggcctgtttctcctgctgctcaggatgttagtggagctcacagggctcaggttgagcctcttccacccgggggcctgtgggggtcatggtcctggagccaagcgcgtggggctcttgtgagcaaggggtctgctctggcacgcccacctccgtggtagtgttttcatacctgtgtcacacagggtgagaaacatgcttgatgctgcagctcagcacacacacgcacacaaatgtgcacatgcacacgtggacacacatgcacacatgcatgtgtgtatgcacacatgggcacagatgtgcatgcagacatgagcacacgcacaccagaacactagagtcggccgcatcctcctcacttggctgatgcccccttctgcttgatttcatcacaagaaacgcgcatccggcagcatttcccgaccgccttcaccgccagtcccggtctgcatggtcagtttgaaccaggctgccgagagcgcaccaggtcccagcattctcctctctgctggtaactcttcaggcattgtctctggctcacgttctcctgggcgccagacctatctcaccccactcccggtgtggcctccctgccccggctcccaggcactcctgggagttaaagtgtccaggctcctggttcattgctgagtgtttagctcagtgctaacgctgctgtgctccagcatccccgtccctttaggacagaggcctgcgtggtacgtgcctctctgctccagcatccccgtccctttagatcagaggcctgcgtagcacatgcctctcttcccctctgacatcccagagcctctgatgggtctcccagcatacgccagggcccttggctaaaatctagtctcctctgagcagccagagggatcttctcttttgtttgttttgtttttttgtatttatgtatttttttgagacagagtctcactctgttgccaggctggagtgcagtggcgcaatctcagctcaccacaatttccgcctcccaggttcaagcgattctcctgcctcaggctcccaagtagctgggattacaggcgtctgccaccaagcccggctttttgtatttttagtagaaatggggtttcaccacgttggccaggatggtctccatctgacctcgtgatccgcctgccttggcctcccaaagcgttgggattacgagcgtgagccaccgtgtccggcctgttttattttttttagagacagggtctcactctgtcacccaggctggagtacaatggcacaatcacagttcactgcagctttgaccttccaggcttaagcaatcctcccacctcagcctcctgagtagctgggactacaggcatgcaccaccacacccagctaatttttaaatttttagtagagatggggtcttaccacgttgcccaggccggtcttgaacgcttgggctcaagtgatcttcccgcctctgcctcccaaaatgctgggattatacgtgcgagccaccgcatctgacccagcggaatctcttaaatgtagctggcccatcgttctgctcagaccctccttagcttcatgcagccgggcctcaggggctatcccattagcacatccacctcttcctcttcctgcctcccctgggccccttccaccctcacgccgggtcctgctttcccaggaactcaccatgggccctgcctcggggcctttgccctgccctggtctgcccactgctctctggcatggaaagtgcttccctgcctgccttccacgtctcgctgagcacgcctatcccacttctgcggaagcgctggccctcctagtcctgccttccctcgggagatgttggctctgtgcgagcagggctttgcggctgggtcgatgctgcatcccccacccccgtgcacgtggcctctgggctagcacgcaaaggcgccctcacccttgctgcgtcctggaaggaaggagcacctgccctggaacttggccgggtggcgttaccaccggagggtccagtataggcaggactgaggtgtacccggcctgctgtgagccccggcgtagtgcagaactcggggcctcgtttcccaagaacacacaccctggccatacctcagggcaggggatggaacactcgtcaaatagcgggttttctggaggcaggtcccgtggtggggagtggcttccttgtccctaaatgccctttctatctgttctcttggcttcggaggctgaggccaggtgctgggagagggggtgggggatgcagttgcccttccctccccactctctagcccacaggttggggctgggtgggttggggccccacagcctcctgcttgtctgcgacagggctgggcggcttcccttcctgtgatcctcaggaaagatcaggatcacatcataacaaatgaccggaagacacgggaggtggctgagctgggggtttctgctggagctgctccctgggcccttgctggcaggggctggctgttgacagtcagtgtatgttatgccggtagaattctcatttggctgttgtttgtgtgtgcctgtttttatcccttgtaattaaaacatttatttggccttcgcagtgaaaatctaatttcttgagtctaagaactgctgatcttggcaccgagatgcccgtccgtcgggcaaacagacccagagccgttggattattcatagcacggcatctgcagatcaggctgcagtggtgctaatcagagctgaggtttggtaattgatgtgttgagcaggattttagtgggaggggggtgccggcgtcgttgagcgattgtgtatggccggtggggggcccttctgggctgactcagccgcgccaatgggaacggcacctcggcagcggcgcgtctgagcgccagttgtattctgcctgctgcaccatgcaaatgcgctccttcagcccgcagacactcctctgcggccgggtttcttcttaccccctttgcacaggtgtgaaaaccgaggctcaggaaggtcattttcccaaggacattgatcaggggcatggctgggatttgaacttgggaagcccaccttgagcatttgtggtgtcgacccccaggaggggtgcctgctctgggttttctcctctgtgttcggacccttcggagtcaccagggtgacctctgccagtaatgctgtttcttctctgctttcttccagaccatcatggagcagttcaaccctagcctccggaacttcatcgccatggggaagaattacgagaaggcactggcaggtggaactgcgcccgggccccgtggggtgggagctgcctcctgagctggtagaactgcgcccgggccccgtggggtgggagctgcctcctgagctggtagaactgtgcccgggccccgtggggtgggagctgcctcctgagctggtagaactgtgcccgggccccgtggggtgggagctgcctcctgagctggtagaactgtgcccgggccccttggggtgggagctgcctcctgagctggtagaactgtgccctggccccaagggtgggagctgcctcctgagctggtagaactgtgcccgggccccgtggggtgggagctgcctcctgagctggtagaactgtgccctggccccaagggtgggagctgcctcctgagctggtagaactgtgcccggaccccgtggggtgggagctgcctcctgagctggtagaactgtgcccgggccccgtggggtgggagctgcctcctgagctggtagaactgtgcccgggccccttggggtgggagctgcctcctgagctggtagaactgtgccctggccccaagggtgggagctgcctcctgagctggtagaactgtgcccgggccccgtggggtgggagctgcctcctgagctggcagatggacttgggcacagcctgtggggcctggtcaggagcgaaaggaggtcttctgttccagcaacaaagctggacagcggctctgagtgaaggtgtagcccatgcattctggactgggtctgctgtcactgtggcagcacgcccctgcctgtgcgggctgctcttgtcctgtggcatctagagacgggaggggtgcggatgtcagtccctcaggatcatgtagaaactgtgggatcagggctgggatgaagctgttggtaactgcagcagcttcgggtttgagaaatgagcgaacgccctgcagctccttctcacaaagagccgggacagagggtgtgggggactggtggctgcagggacattccattcttcccactgtctccctgagacgcttcccatcgcccccaccccacccaggcactccactgcggggccttgggtgcacctgggtctttccgtcctggtggggagtggcttccttgtcgccagatgcccttctcacctgccctgttggccccgcaggtgcccttggctgagtcctgccatggatggggacttgctattcttggacagtgacccccggtctccctgtaccctctaccgtgtctgtccctgtaactgcagcatcttcatgggcagagtccacatccccagcagggaggagatcgtgtgttttccgggacacgtgctgcgtctctgccggcgcccccggctcctccaccgcttcctggtgttgcggcacccatgggttgggtggagttggttgtccagttttggtgccaggttagaggtgtcaaggacggggcaggagttggtcagccctcgttccttttttaccacctttactccgttgtcacctggggagaaagcactccaaccgagcacctggcagaaggcctgtccctggcactgccctccttctcagctccccaggtggaccagttgtgcccgcctgccacatctagttgggggtggccttcatgtttccttgtgggcatgaatgggacagggagctcccttgggccacctcctgtttgcacccggcaccctgcaggggcccccatggctgccccagcagcagccttgtttctctccaccctgcccctcctctacatccctgggcccggggttgcacccgagggacctgctcatcaaaattgtcttaaagagctgtccttcctccagcgaaagtctgcagggtgttttgtttttttttgagacggagtctcactctgttgcccaggccagactgcagtggcgctatcttggctccctgcaaactctgcctcccgggttcacgccattctcctgcctcagcctcccgagtagctgggaccacaggtgcctgccaccacgcccggctaattttttgtatttttagtagagacggggtttcactgtgttagccaggatggtctcgatctcctgacctcgtgatccgcccgcctcagcctcccaaagtgcctaggattacaggggtgagccaccgcgcccggccgtctgcagggttttcatgacagtggagatgcttgggctgtggcagtgacccccgtcccccagccaggagcttcttggatgaggtagtggaggtcggcagcagagcctgtggcagctctgagggtcggcgtggcctcctggtggaagttgcacctggtttgcttccctatggtgcaccccagttgttgggcagcttcatgggggtcccagggagagctgcctttgcctctggcctgaaatgttgacgctggagagaggctcccgaatcagagtaggaaggctgaggcccggctcgaggtgggtgcagagggcttccaactgtggtgaccccatgatctctaggcacagcacacgatgtccagattctccgggcccagctaagttccgtgccctgtgaatgagaccagttgttcatctcttcctggctgggtctgaatcttggccattacaatgagaatccagagtccagatgatcccacccctggagatgggggctggtcttgcacattgcagactgacgatggcttcctttttccagagccactcgtctgtgggacacttggtgacctcatctacggtagagtcttccgtagccctcacgtggctctccgaggtgtgggtttcttccccgtcgtccgcacacggggaagtggtgtggatgccgctttcagtgggttgcggtgggggccggggcctgtgttcccctcctctgggtgagcaggcacttcggccctttgatgccaccaaggcgtgggttccgttcgggcctttccgctcctgtttggttcctcatgagggtggcggggctgagtgtggagacttggagctttacttcctgctcctgcttttcttgatggcctggtgggaatgagctcggccgtccaggcagcaccgccaccttagccgcagccagccgccctggagtctcacttctgctgttgcgtttttctgctgttgcgtttttctgctgttgcgtttttctgctgttgcgtttttctgctgttgcgtttttctgctgttgcgtttttctgctgttgcgtttttctgctgttgcgtttttctgctgttgcgtttttcttttgttcgaggcagcacacccgtcccaggcacaggccttcattcctctgtggacgtggtcttgtgccgcagaacaaattgtgcgcttaattgaaaagtatataaataaaatctgataaagtgcccagttataggcccctaagtgggttctgtagaaaacggattagaaattgtaattacactgctctccggggccctgccccgccctttctgcggcctggaggtcagggcggggctccctgtcaggtggaggagtttgccaggcactccctggagtccctgaggaggaagcccaggctcttccaggagcctgctccacccctgtggctgtggaggagttcagcaggcccggagcccttcacacccacttctgattagatcagactctgcctctgagatgctgggaggcccctcaggcggcggcaataccaagtaatgcctttagcctcctttgatcagctgtgacgggcgtcctggtctgagactgtgaagcaattggaaatagttctcccactccaggctcagcttggggatctgtggggaaatggcttcctactgcccagctctgcagtttccttgcccagggttggttctttgtctcatgaaatacagttagtacaacactccctccccccggccctgcctggtagcacgtgatagggatcagctctctgcaatttgacttgaatagctcaggacctgaactggtacgttgtgttcttacgagtcaagggagctctcatgattggggtgaaacaagaatatcaacaagagatgggttctgtccaacccagaaatcacagcgagtcgagtattctcccagcttgtctgggcaggagacagggttgggcctgtgcgtgccaagactgccgtgtttttgctgggggtcttgtctgtccctcgtggaggaaataactgctcccttttcttctctctcaggtgtgacgtatgcagccaaaggctactttgacgccctggtgaagatgggggagctggccagcgagagccagggctccaaagaactcggtgagaccccccccccccccccgcctggtagtcgcctgatgccctcaggcagctctggggccctgtcctgtgtccagccgctttttgatttgggatcaggttttgcctgtcaaataggaaaatattttaatgacagtcaccctgggagctgccttgtggggcacaccctgctgaaagtgggtgctgggtccccgtcccctgaggcgtgcagcctggggtgaggacagcaggcaaacccacgtttaaaagtgttcccggcaaattggagcggctgacatgggggtctgtgtgcttggatgatgggattagatggcgtgggaattcattcctggtattaaaatgagtgaaaaaggatgcaagcccacgtgtggtgtggccctgaggaagacaccccagcagcgtgagtgggtggatttcctggagggcaggttatgttattgatgctttgtctgtgtttagcaaattttctgtgatcgctcctgtgacgtctatgtcaagggacacagggtgaaacctggaaattcagggcccacgtggtggtgctgcaggcgtggcttagacggagtccatgcttccacagtcccctcacctagcagggtggtgctgaggtttcctctgcccgcctgggagaccccgggccggctgcctgtgctcacttgctgctcccagagcgagctgtggccggcagagcggcccttgacgcacaaggaagcctgagtcgctggagaaaccacttggattcctcttccctctggtcacggaggacaggctgcgctcactcttgaccgtctccccgtggccgccaatctgggaggtggtctgcaggtctggagaccctcggatggggaagagtcactgtgactggccctgttcccttctttctacttttcttctcggggactgaaagcccccttgactgacagaggccctggctgagtcggcaggcggtgggctggggggtcgtgggttgctctgtgtcacttccagctcccagaagaggctccgtctccctaatgctgaggctctggggctgggaccccaggaacccagctttgcctgtccaggccccgttctctccagttcactcacgacgtcctgcgccgggaggcagacctgccggccgcacttcgcagccccctgcggaccctcatcggagccccccccccacgcccccacaggctgctgccttgggcaggcccgctggcgtgtttgctgcaggtctggtgatgcccgggcggctggagtttctcgaggcaccgctgtgctgacagactggggaggagaggaggaggcactctgggcggggtccccgggcctccgcagactcagcctggaggatgacgtgtgagatgcatggtgttagggtgacggaggctgagactccagtgcaaccaacagcagcctgccttggagctcctgggccctgaccgggtcttcagggtttggagaagggcagaagcagtgggtgtctgtgaaaggggcattttctttttcattagagacagggtcttgctctgtcgcccaggctggaatgcagaactatcgtggctcactgtggccttgaactcatgggctcaagtgatcctcctgcctcagcctccctagtagctgggaccacaggcgtgcgccaccacgcccagctgattttttatttttaattttttgtagagaaaaggtcttactgtgttgcccaggctggtcttgagctcctgggctcaagtgatcttcccaccttagcctcctagactgctgggattataggcgtgagccaccacgcctggctgaaagaggcattgtcttaccataattaaccaggtgttgaggagatgaggtagaggaccaggtgtcttcgccccttggtcgcatgagggtctgcccgtggggaactccaggctcttgtggcccacagtgaggggtgggtgggtccgaaatgggtgggattccagaacttcctgttggcggagtccctggtggttgactgcaagaaggcgctgagcccacatgggcacaaggaggaggagggaagcttcagaagagagggagacgtgagggctcttacttggatcagggagcgtctgtttacctgtggccttttggaatctctccccgggctcctcctggagcgtggagccccgctgtgtgcatctgcagagggccagccacatgtcagccttgctctgggagtcaggttttcttcccggtaacagcttgattgacagaattcacatgccatacagttaccccattagagtgtacagttctgtggcttagtgtatttacagtgtgcaaccattgccccatctaactccaaagcatttttatcaccccaaagcgtttttagcaccccaaaaagaaatcccataccccttaagcagtccctccctcatccccacgctcccagcccctggcagccacaccactgtgtctgtctctccggactggcccattctagacatttcatataaatggagtcatacggtgtgtgaccttctgtgtctgacccttttccctgagcacatgtttaccgtccctctgtgctatagcccgtgtcagggcttcattcctgtttgtggctgaacgatgatccattgcacaggcagacccatttcatttatctggggttgctgtcaccttccggcagctgtgagcctgttttcatctctcctgggcatgcaccgaaactggaattgccgggtcagatggctgggagttgagtttttatgaaagcaacacatccttgtttcaaacaaagtcagccacttcccaccctcctagtgtggccaagtcctactgcacagaggcggctccctcggctgcgtgtctaagagggcaggtttatgccattcctcctcctcctcctctacctccaacagggccgggcgcggtggctcacacctgtaatcctagcacgttgggaggctgaggcaggtggattgcctgaggtcaggagttcgagaccagcctgggcaacatggtgaaacccccatctctactaaaatacaaaaaattagccgggcgtggtggcatgcgcctgtaatcccagctactagggaggctgagacaggagaatcgcttgaacctgggaggcggaggttgcagtgagccgagatggtgccattgcgctccagcctgggagacagagcgagactccgtctcaaaaaaaagtttagacatcatcgaaaggattcttattacggaagatgtggacttagcctttttatgctgtcccttgccccacccagtataattatcacagtatttgtttaaactcatgtacggtgttatctgatgatataaattcttttcatggctaaggcagacggtgtattatgatgactgtttgtacaacttcatcgaggtgtctgagtgtccagtgtgatgagttttgacgtgtgtacacctgtgaagctgtggccacaatcacaatggtgaacttgtccgtctctcgaagagtcctcgggccctccctccccatctccaggcaaccactgatccgctttctgtcactgtaatttagcatgcatttgctggagttttacatacatggaaccatacggcgtgtcttctttttttgtccagcttcctcgggtgtgcgtggttattctgagctgccttcctgctgcgcgcgtcaggaatttgttgcatttcgtcgcttgcagggtcctgttgtgcggaggtgccacagtttggccgtaccctcatctgttgatggacacctgggtgtttttagcttggggcgttcctaaattttcatttccttaattaactgatgttgtggagcatctttttgtgtttttgttcaccactgatctctcttggtgaagtgtgtgttcgaatcttccccctttgtttcacttggcttttgtcttcttaagttacgagagtcctctgtatactctagatggaagtcccttgccaggaatctattttgcacatatttgctttcagtctggtgggcctttcctttttgtaatagtggttttagttttttttgagaccgaatctcactctgtcacccaggctggagtgcaggggtgcaatctcggctcactgccaccttcacctcccaggttcatgcgagtctcctgcctcagcctcccaagtagctggcattataggcaccggccaccacacccgcctaatttttgtatttgtatatttttagtggagatggggtttcaccatgttgtccaggctgctctcaaactcctgctctcaagtgatctgcctgcctcggcctcccagagtgctgagattacaggcatgagccatcgcacccagatctgtaatagtgtttttagaacaaaagtatttaattttaatgtagttcaatggactgattttttttttttttggtattacagttttttggtattatagctcatggatttttgttattatgactctgtggtatttattatgacgcctttgcttttctggagttaataatggtctcgcgtcttggttcgcttcattttcaatgcgccatcacgaatttctccccacagcctcagctgcacccttgcactggctttgctgttggctgggaggtcagtctctgtttcttctccttttggagcctccctgctccctcgtgggctgctcggccgtgcagagtcagcttctcctcctcccgggtcagagccccgtgttttctgggtcctgtgtctttactgttcctgtattactcccaccatttggggaattgtctttttctttccttttttttttttttttcggttaggtttctgagtgggtgaacggggaatgtgtttgagccagtacgtgtctgccattgtctctgctggtggcttagctggtttggagtttgcaggtggaagatgctctgtgttcagagtctgagggcctcacaccgtcgtcttccagctcccaccgctgctgtgttcagggccaccttggtgctgattttatgtgagtgttacttcccccccgcccccccgccgcccccaccagctctggagatgtttgtgctggggtgttaggaatttcctgccgatatctttcctgtggtggcaggtcctgagaggcttgtgaacagcatcactccatgattgagagtggtgtgcagcctccagggcccacaggagcggggacctgagcgaggaggactgcaggggttaagaggaggggtgaaggagaggggcaaagggtgtgtccaaaggtgtgaggtggacagaaacaagaggcttttgcagaaatgtgaaaggtctggagcgtatgagggggtgaggctgggaggggaggcagggctttgaggagcccagggccttgtagagattccaggcttggtgccacaggaagatggatttgtgcaacctgcctttctcactgtgtcttagggtccatctgtcatctgtgttcttgccacacgcggatgccttcgttttcactgctgtagaatattccataaacgtgtaacagtttctctgtcctcctcggtgagcagttgagttacccctggtgagtttttctggatgagctcgaggcccaaggggccctgaggctgagctctcctgcgggatgaattccacaaggccccgtggggttgtgcggcagccacttgggcagtaagtgaaggaggcgttcgtctcactccccaggccgggggctcagcagttgccctgggagttttgctttctgtgtttgcaggctgtgttattaagtgcgtgtgtgtgggtgtgccttcctgagctgagccctattatcgcaaggtggcttgctctggccctgaacagtcttatttttggttcgtttggttgggtgttgagtttgtttcctgttcttcctcttcagccccggggacgttgctcatttctggtcaccttctcctccagctgtccttgctgccccaggatgggaggatggaaggtgctgtccctgctctctgggaatgagccaggccctcagtgggtggagcccctcccaggaaggcagagccctggtctgtgctggggtggaggtgctcagctcagaccagccccttgcttggccgggaggtggttttcagtgatttggtcctgacacccggccgagcagggccccagcctgtcctctctctgctggcctcccacccgggcccctctgggtgtggccttgtggccatatggggccagggttgccaggcaagcagtggtgccaaccctggctgcccttcttcctcctcttctcattccttccccactttcattcttcgcaccttttctttcccatgtggcacctgctctactcacagggcagtctgcctttagtcctgtgggtctctctgtacctgcacctctggccctgtagtgcccacagccggggaggtggcctcgggctatgtagccctcacggggaggtcctgtcttcagccccgtcaggatgacgaggattcggctgcactgactcccggctaatcactgtggatgatgctgcccgctccccctttccctgcagagccctgagctctgttcttcctgggaagagtgagggtcctggcagcaccccctcactgtagccaagcgtgctgctccaagtgagccccaggtctccggagccgggagccagccttggcctgcgtgagctttcatgcttctgaaccagagcctggcccaggggtgaaagcccagagagtctttttttgctttaaatgagcagctggggctgcccctttgttctctctcctggagtgaggagtggctgggtcagagccggcctttggtgatgtgggtctttctgtacctgtggctctggccgtctggcacacagctggggaggcagcctcgggctttgtggcctgcagacctcacagacggaagggcctcccgtcttcagtcagagactgttttttccctgcagtgaaagagtttctgcagttaactctcagggctttgctttgatatggcaagcgcttagtcagggaatggagtggcagctccaagttccggaagcttctcacagcccttctaatcccctagccggcagccacccacacttggctgtctgctggctgactggttttccaatccccgccatggtgtttctcccttccagctccggcaggcgtgattccggggcacacccactgctctcaaagcccctgagccagtgcctgggttagacttttcccaggggcgtctgctcctcatcctcttgggctttgtgcttgggttgactggcagctcggggagactggagtggccggctggatctgagtcctgtaggccagtcctggcatgtgtagacactcagtgtccctgtggcccaggagcaagcctggcaggtgacccgagggagggcgggcccagcctggtcacagaagcagtgctgtgcccgtcccggccccctgcaggggtccagggtcctgagctgagagcctcaggaatctggggaatttgctaagatgtgtgagtggctcctcctctgttttgggcacctccctggaggctggcaccaccaggggctggtgtggagacccaagggtggagggcagggcaggtgctcaccatgccgctgggccgtgtgggtgcctgggtggacgtggcactggttctttgtgcgggtggaggacagctgtccagtctgcctcaccgacagctgtggtttgcagtgtcctgtgactgcactcctgagcacacccctccacccccttgctgctgacagctgcctatggcccaggccctctcgctcccccacccgaggctgggcgcacagagctgggctgagcctgggtctatgctggccaacgggagaggcagatgggaggagcaggccagagtcccagtgacctggggtcctggtacaacgtgtacacctgggcaggtggctctagcactgtgtgccagaaccgtctgtatgaaaagagggtcacgtagctgccctttggcctggctgtgcagggaggctaaggtctaatcaccctgtagagagttgtcggctcttcaggacggtgccctgtcttcagtgaggggggctgtcattgcagtgagcggggccgcagccctccccagcagagagcactgcacttcctttgtgtggtcagacccgcatgtccagcctgtctatctggggccctgagcctgttgtgtttcttgtccaactgctctgtggccctgccacggaacacctgagccaggctgttttgctcagccctttcccatctctggaggcctctggtgtgtttttgtcctttgaagaggccgctgtgtacccgctggtgcccacagcatgcttgtttgtgatcacagggcgtgtgtgtacctgctgggcgcactgggcctgtcctctgccagctgcccggcatccccaggtgcccgggagagtggcaggagctccctgttgggccagcctcagaatgaggatgttagctggcagggggcattgtccctgcctgaaactgtgggctggattttggtcactgagtcactgaattaaggtgtggcctggaaacttcccatagctgttggctgcagtgcacgcctcgttgtccagagtgaggcaggtgttctgaatgcccacctgggagagctggggcctggggcccccacaggtcaggtggtgcccctcctgtccccgcaggtgtcggcctccctcttagaggcactgagtggctccctccgtgtgtgcggcatctctgcgtctctgaaacgtggggccctgtgcagaagggaaggtccttggtcatgtgaaccccaaggggacttcggggctgtccccagtggctcccgttggccaaagtggctcggaagcaccatctcatgtcactcacctggtagggcctcctgctctctgtgaggccaggctgtgtcacggcccctctgggctcaggcggctccatgcacagtgcacccaggggcccatgtgtcccagcctcctcctgcaggtggaggccgcagcctccctttgggccagtgactgtgacagcagtgtatgggcatgacacctgctttcaggccctcacggcagggccttgccttgtaggctgccaagtcttcctgacagacaccatttgaaggccttaattagatcaaccttacatccccgagggggcctgacacggaggtccctggttggtcccggacctccagcacagcggcgcctgcagatgagagggaagcgagatgcccctggcccaagcccagcctgggggcttcccttccagagcccaaccgcttgctccgacctgcctgtacctcccttcccccccacactattcctccctccctacagtaggactccggcaggggtgctccagagacagccacctgaagaagccaccaggatgcttgggaaggacgctgccctgggccctgcctcccgccccatggggatctttcaggcccccaccgcctgttcgcagaggcgcgtgctcctgctgaactctgtggggaccctccagcacctgagcaggggaagggggcgggggggcctcatggtgggcgggtggagggccttgttcccctctggctgtggctggggatggcccagccctgcccgcctgccaacagctttgcggtgcaggctgagctctgcagggagattagcagccgtcctgattggattggccgtgttgcagccgcggcagccaagtgtgggcccctggtctggctgctcgtggtttgatcctgagccgtttcctgctggtgatcagtagctccgagcgtcacccacagaggggctgctggagtctcactcagcaagaggctctgaggcccggccaggtgtcctctgccggcgttgctgctgctccctttggcccagcatcgcagcggggaggcaccctccctgagcgctcacgccacagcgtcaggcctcagccggccagagcagggaggacagctggtctctcccctgagatgccggggctgcctgtcccccggttggggcacagctgatggcacctgccgtccctcggtactgtcaccagtgctccctagggagggaaagagaggagccgctcagccttcctcctcaagccaggagctgctgaggtgctggctgcctccgatgtggccccacacagtgttggccgcaggccgaggggcctgggggcacaggtgccggctcaggagcctctgtgggcaggtgtctgcatctctggggtcctgggggacgtgggtcccatgcactttgggtggtgccagttggcagaagggtgggcacgtcaggcctggcagacactggtcgcagccacgcagggagatgacggccggtgctctcagggcggcctctgctcctgtttgcatcttgtagggtttggagcgagtcagtggctgagaaactctctcccaggagcaatgttccctcctggtcaataatcagtgagcacagataggcgaggctggttaggagcagaccacgcccatggcaggggtctccccctcgggcacgcgtgaggaactggaggtctgaatggcttctgtcccctgcagagcagctgtctgagggggtctgtccccggaggccaggaccctggtcagtgccatccgggtcacgggtgttcttttggccccagctgtaggagggcagcgatgcagggcccaaaccagaagccgctcctgaatccctgaccccaggatcagtgtgaaacaaagcccacgacccaaggaccccgcagtcagcagccgcacagacggagccagcactggagcccgtctcaggtggctccgctcttgtgtcccctgtccccgcttccctgccctggggagggtgcccccaagcctggtactgcagagaaggccacctcggtggctccttggttgtgacatgaagtcctgcgggagggcctggggggactccggtcccagggaggtgtctttctcaggatggggggccatatctggttgccagtgtctctgtccagccttgcgttcctggctgtgggaggtgccagtgggttcccttgcccacagtgtctgtgaccgttgtcccagacatgctcctgtgtgcccgctgccgagctccagctgctccaggctcctccactccccagtcacacatttgacgacttgtctggcactgggccccgtagaaacagacaggacagggtctcagcagccccaggggtgatcccggtggcaggggctgggcttagaaggatgcgctgggtcctccggctgtccccactgtgcttgtttgtttaaacgtctgaagggcaaacggcagagcatcaacttctggtagctccgaatggtgggtccacgggcattcgtgacggtctcctaggtacagtttatacattggaagcatttttgtaattgttaccagcagtcacatgcaggcggtcacatcactgcagggccaactggactgtgtcccgggcagagactgaacacgtgcacacacccagccagagcacgcacgcgggcacagatagtcctggatccaagtaccgaggggcggcgctcatgccatctccatggagtgctggaggggtgacagggagagtggcccctggcaaggtggtcagagaggctggggagtggtccacggggcggccggtctgaactgcccacctggcttctcggcggcccccgctcatgccatgggactctgggcagctggggtccagggctggcttcaaggacgcctgctgggagttctcgagtctgttccctgcctctgcagtagccccttccttttcgggaggtgtagtctgcgaggcccctggaaaagcctggcggggggcgtggttctccatccatggcagctccctctgcccactcgggggactctcccccgccaggactgtccactcacgagctcagtctggccagtacgttcctaggcaaggttcagttcgcctcccagccttcctcggtggacacctctggtctcgccggtcacgtgggagccatgcccagggcaccttgggaggatgctgtgccgtgggacctgaacaggcagcagaggtgaccagggtctttggagatgcacttgttgtacccaggaagattggagggttttttgttttcttggttttttgttgttgttgttgtcttttccccctttttggagacagagtctcactctgtcactcaggctagagtgtggtggcgcagtcatacatagctcattgcagcctcctgggctcaagcgatcctcccacctcagcttctgagtagccaggactacaggtgtgtgctgtcacgcctgtatactttctaaactttttgtagagacaagagcttgctttgttgcccaggctggtctcgaactcctggactcaagtgatcctcctatctcggcctcccaaagtgctgggattacaggcgcgagccaccgtgcctggccagaggttggtcttgcaaggcaaatttgcccatgaagaaaggaacaggccctgctccaagctgtggcctgggtctgccctccacactgagcggacgtccaggcagccttcgggctgggtattgaatgtgctctgccgggcaaccttggtcacttgtggccaaaagggaggtggaaatgtggaaagaaacccctctgccccgtcagaccttaaacctccttgcggacactgggcaaaggaagaggcaaaaggtgctttggagggaggagagaggcacagggagggttgctgcagaggggttcctagtggacgcgggggcaggagaaggccctggcgtgcctgtcccgctgcagctgtgggagctgggcttggccaggtcgctcaacccgtggggagaaggtgtcgggttagctcagcccccgcagagcctcatctccacccctgtgtgtcacgtaggggccctctgcagcctccactccagccaccccgggtggatggccgctgacccgggagcccccgtctgcctgggacgctgggagtgtgtgagcagatttggtgccagaggcccgggcaggcctgagggtccttgatcccagcgtgatggtgcgttgctggtccagggcccatccttggagccggcgggttggagtggtggctcaggacagtgggggtggatgacagaaggcagcctcggcctctgctctccctccacccccatgtccaagatctgaatgctgacccagccttgacaccaaggtggctctttggacttgcttggtttcagaactgtgtgtggggaagcagcgtcagctaccgtcatcaccatggcaacacagacattgattttttttttttcccccattggttacccgctggccacattccatttttgccttttttgtaggtgggagaagaactctgcttctcccaaggagaagctggtggctggagggcagcagagagaaggggcgggattgggagtcacccccgaggtggcgtccttgggctttgggtcagcactggatctggtcccctggcccctgtgggggctctgatagcaagatgtcctgtcagccccctggccatctgtccttccccgtgatgagggcgctctgttcgagccctgcccaggtgggtggtgatgagctctcgaggtgcctttgggctctggaagccaccaggataattgagagttgtggatagctacttcagaaggctctggaaggtgatgcatgctcacagccagcttggagcagctgacctctcgcacagagcccctcttccaccagcagagaaaggagaagagttccagtgcctccggaagcaacagaaatatccaggaaacgagtgtttctgtgccctcagtgtccactggccaaaaagagcaccctgaccactcggtagcagcgcccgtccgtccctgagcctctgtttgagggactcacgtccagctcccggcagactcagcgcgggggtcggatgccttctccgcaccatcccgcaccgccacgagctgctgtggctcacattctgccatccgagctctgtccaggaggcagccgagaattggagcagttcccacgccaagtagggccttgtgggtggccggtcccctcctccagcgtggcacggaggcgccggagcatgcaggtctatgcctctgcagagtctggggcatcttgttccatttccttgctgcctctcctctcgtccgtgatcatccccccctccccctctgcttccggcctccccggccttcccagtctcttgggccatcatcgtggttgtgttggtcctgttgctcctccttcgagcgcccacgtagggctggggttccctgcgggctgtgggtgccgtgccctccccggctggctccagccctcagaagcttggggagggtgggctgggccatctgcattccacctgcccaagggctgccactcccttttcccagatggctggagtgccccagggcagcgttgggagacctgcgcaggccccacctcagtccacaacaatgttccttgattccctccggcttcctgctccttcacctcctcctgcgcagcccggcctgacccatgtaatcagggaacaggaggggctctcctcagtgtccctatgtccatgccttgtggccacctgagcacttctcagggtccagtggaaaactctcctgccctgtttgacgcccacactcgtcagtttcaccttggtgccaagagcagacgatctgctccaggccccacttgggccacagcctcacagccgtctccacgtccccacccgaacctggcatttcctgaattcctggcccctgtccgagaaggaggctaaccctcctgggagagctctggcaggtgctgacccaagtccgtggggtcttcaacctttgcagacacctgcgcccagaggccacgcctcccactctgagcacaggcgggcggacgctgtctggcaggctctgcctttctttcatttttcctgacctcttcgcccagcgtcctctgcttggaggtgggtgtatgagaaggggccattggtgtcagagtggggctgtctgctgagcaggtgaacacacccccagtccttgctctggggccgggctgtcccgtgggcctcacggacctcattgtctgtggtcatgagcctgcatcttactgatttaatcccgggtgccgggtacaaacatgcacgcttccctgatgagaaaatggcatctggcctggagccccttcccacagccctgggtattgggtgcctgtcacctccaggatgacccccagccagcagacaggtagcaggtggagggtacctgctctggggccctggtggccccagtgggttgaagctctcttcgtaggtggcgtggggccttctgtccccatgaccctccagcggcccctccccatgccagggctcagcacccctgctcctcagagatcgaagcctccttctcggaccttccccaccactgtggtcccagcttcctgtgcagtctcttggttacccaggagttcagaacttttaccacctggggtgcctttcagatactcggacctcttggtttgtaggagtaccaggccggggtggggaggtggaggctgtgctgctcccctcaccctgggctcagccagggccgccagccttcttcctgggagcagtcaccaagctggtctcgggccgtgctttggtagaaatgatcttttaactgactaagcagagtgttaactgaaatcatcatgaaatgctgtttatgctccatttgggattcggagtcaagcatttggggaccctcgggcagggtctgagctgctgtttgccctcgcagatgaggacgacgatctgcacagatctgcctccaaccctgggctgagagcatccgaggcccaggctcttccctcccccagtctttttcactgtctctgagattcacgctctctctcaggttcttgtcactcgcagactataagaacacgttgtattttctggagtaaaaaaaggcacaaatctttaaaatgtcactgttgtgaaagccgaagtgtgaggggctcttctaggttaaaggactaaagatgcccagcgccccagaggaagggtgagagtcctctgggagctggcaggcgccagttccttgtcgctcacggttaagcccgtgtatcacttatttgtctcaagtgcttatggagcagtcttccaataggtggaatgctgatttgttttcctaaaatgagagagactaaagccacgtgccaacgcaacacagcgggacccttgatgagaacctggatcagggaggagcttgtcaatggcatcgtcgggccattcaggagcatggtgtgtgctgttgatgagaggaggatgcgtctgtggtaaccttcctgtgtgtcacaatggaggcgtgatgaggcagagaaggtccttgctcttaggacacagctgcagtattgggggcaggggcagcatcacattgtctgatgtctgcagttgagtctcaaggggctgaaaaaagtgcctgtgtgtctgtgtgcatgcatggatacgtgtgagtgccggtgtgtgtgcatgcacggatacgtgtgagtgtgcgtgcactggtacatgtgtcactgtgtgtgcgtgcacggatacgtgagtgctggtgtgcgtgcatggatgcgtgtgagtacgtgtgtgtatgcacaaatacatgtgagtgccagtgtgtgtgcatgcacggatacatgtgaatgcctgtgtctgtgcgtgcatggatgcgtacgagttgcctgtgtgtgtgcacgtgcacagatgtgtgagtgcctgttcgtgtgcgtgcatggatgtgtgagtgcctgtgtgtgcgtgcacggatgcgtgagtgcctgtgtgcgtgcacggatgcgttgagtgcctctgtgtctgcgtgcacggatgcgtatgagtgcctgtgtgtgtgcatgcacggatgcgtgtctgtgcgtctgtgtgcgtgcacagatgcgtgtgagtgcctgtgtgtgtgcacggatgcataagtgcctgtgtgtctgtgtgcatgtacggatgcgtgtgagtgcatgtgggtgtacctatacatcacagaaagagtggtgaagcgattgtggcaaagcacaccgccagggaacctcggcgaagtgaatgggtgtttgctctgctatccctgcaacttctctccaggttggaaaggttgggctgggaagagaataatgtagttctgttttctaaaccacagggaagaatgggcttggcaaagccatgactgacagtgctttctgtctccttcaccttcccactgtgttgagccagagccattcgtgggaacccctgggtgtggttgtgaagccagcctcggctcagctcacccacagagctgtctccagccacatttgcattccggctgtgcccacatttggcattgggggaaacttcctggtgcctgtgatttcaagccggcggccaggtctgcgcctgtgctgggtctggggcatcttgtggcacttccttgctgccctctctcttccgggaccatcctcacctccctccccatcccttcccctgtgcttctggtctccccagccctcccagtctcctgggctcagcagatgaccacccagggcatccccggtttggcctcaatctttgaatcgtgtgaagcgatcggaaggagctcggccgtcgcctcaagtgggccgccttccggtgggctcccttcctgtgggccgcttgcatgccgtgctgtcttcagggatgagcagttaatccttctcgttcatctgctcactagacgcggctgtgtcagagcagtgcctgcctccttgtggccctaaccttgtggggtgctcctttgagagcgtcctgagtgaccctctccaaggaccctacctccacctgtccaccagccctccttgcctttaaccctttcagtgctacgcgtatcaccacactccctctgtgcccttctcccccaggtaggggccacttagaacactatggcagcctttggtgggcctcaagtcctgctcctcccctccgtgggcacattggggcccccagtactgcccagcctttgcactggccagccacaggctccatatgaggccagctgggcactgccatctctgtcctggcacggaggttctgccagggtctgtgtatacttttttgggtctgctgggaattttttttttttttttgtagtggtgatgaataaaatgcataacgcagagaagcagaagtgcctgcacccgggtgttccctcttgctagtaatcctgaggtttggtagaagccagctcctgctggggtcaggggcagtgaggcaggggctccccagagtacagcctgagaggcctggctgcttggctggggggagtgccgagtctcaggtcctgccgggaggcacagtccttccagaatcaatccctgttaccatctgcagcttaactcattttaagcttaaccatctgcagcttaactcattcttgctttatcttccctgtggaccaggtctagcctggggcagacaggagatggcagatggacacctgggaggggctcactgagctccgcctctccatcaacggaggccccgtctaggttgtggaggatgcttgagagagccctgatgttctgacctcccaaaaggtcaagggtgctggcagccggtgagacgccgcagtttgctctgctccccggggctgtgcttgccaggagacatttcggctataagcaggcgagaatacctccagaacacacatcaggaagacagatggtgtgcaggtggggctcagggctgtcatcccctgaagctgcttctgaaagagctgttcttgcagcagcactgttacaaaaggccacatgggaaacagcccgcacctctcagtggatgccggcagaaacgcctcgtgtatccatagggtgaagttgtattcaaccacaaaggacaggctgggtgtggctcatacctgtaatcccagcactttgggagtccacttgatcccaggagttcaagaccagcctgggcaacatagtgagaccccatgtctacaaaagtatcttaaaaatgatctgggcatggtggcacacccctgtagtcccagctcctcgagaggctggggccggaggatccctcgaacccaggagttggaggcagcagtgagccatgattgtggcacttcactccagcctggtgacagagtgagacccctggctctaaaaagacaagaaggagactctgaggcaggctgcaccatggatggagcttgaagacattgtgcccagggagaaaagccaaatgtagagggtcatgtgtgattgcagtgattgaagtgttgggaataggccgctccacagagatgccgtgagactggttcccggagctagggggcaactcctggtgggcgtgggtttctcttcggggtgatgaaagtgtccgggcagtcagctagctcaactggtgagcgcatgatgctgacgatgccacagttgtggactcgatccccacaccggccacagtcccaatttcttagccgggcatggcagctcacgcctgtaatcccagcactttgggaggacggggtgggtggatcacctgaggtcaggagtttgagaccagcctggccaacacggtgaaacccccgtccctgctaaaaatacaaaaattagctgggcgtggtggcgcacatctgcagtcccagctactcgggaggctgaggcaggataatcacttgaacccgggaggcggaggttgcagtgagccgagatagtgccactgtacttcagcctgggtgacagagactctgtctcaaaaaaaaaaaaaagtaaaaatggtgaattttatgttatgtgaatttttctcaattttaaaaaaagagcctaatgctgggaggacggatgcttgggcttcccgcccgtcctgaggctggtggtgctgagtatgcgggtggctgtgggagcgggtgccgtctcaggtgcgagccagacaccgtgggtgcgggtgcaggtgtgggtaccgttttgggtgggagccgggcgctgtgggtgcaggttccacctcggagctgggtgctgtgggcacaggtgcgggtgccatcttgggtgggagccaggcactgtgggtgccagtgccatcttagatctgggcactctgggtgcaggtgccatctcggagctggatgctgtgggtgcgggtgccgtattgggtgggagccggacgctgtgggtgcaggttccacctcggagctgggtgctgtgggcacaggtgcgggtgccatcttgggtgggagccaggcactgtgggtgccagtgccatcttagatctgggcactctgggtgccggtgcgggtgtcgtcttgggtgggagccgggcactgtgggtgcaggtgccatctcggagctggatgctgtgggtgcgggtgccgtattgggtgggagccggatgctgtgggtgcaggttccacctcggagctgggtgctgtgggtacgggtgccgtattgggtgggagccaggcgctgtgggtgcaggttccacctcggagctggatgcagtgggtgcgggtgccgtattgggtgggagccgggcgctgtgggtgcaggttccacctcggagctgggtgctgtgggtgcgggtgccgtattgggtgggagccgggcgctgtgggtgcaggtgccatctcggagctgggtgctatgggtgcgggtgccgtattgggtgggagccgggcgctgtgggtgcaggtgccatctcggagctgggtgctgtggtgcgggtgccgtattgggtgggagccgggcgctgtgggtgcaggtgccatctccgagctgggtgctgtgggtgcgggtgccgtattgggtgggagccgggctctgtgggtgcaggtgccatctccgagctgggtgctgtgggtgcgggtgctgtctcgggtgggagctgggcgtgtttgcggctgttggtgtcatctcgggtgggagctgggcgtctgccttcctgtactgcagcctccgctcctctctggctgtgctctctgctgctccaggctggcagcagatcttgaggatgcagcctctggaagctctcagggctcctgagttttggggtgtttgacctccagcctgctcagccccgagtcacctttgagctgtgggggtgtcaggtctctcccctgcaaagtggggtgatagtcccatgctggttggggtaagacctggggggagtgagaccaggctcagcctgcaggagagatggagggcagttgtggggtctcaccgatctctgctgggattccagaaaggagctggggactcagcagatggaaagggccctctccgccaggtgctgcgcccaagcagaaccaacccgaggacagaaagatgctggccgggcatgcctggggcctgggttcctcagcctcacctgactcaggtgctgttttccttgctggggagcaggggcccagccggggtcttgaggcagccctgtccccatcagctgcgctcagacctgtccacaggaggctgggctccctggtcacaggcagtcccgtggagcgggtttcactcttagcctggcgaccgccccgtctgaggtggaggtagagctggtggggtgaggcccacggtgaccccagtgtggaccggctgctgcttcactcatcacggtgcattggtaggtggttgaaaagagagaggcctcgttttcaggatgactgtgtagacacatcacccgtgacacccatgtgtgccccctttctagccctccgatgctcctcctcctcctcactccccagcatccctaggcagccctgggctggtggggtgagctgcccagagttggctgacccatcagcctgggtgcaacgctgctgcactcccacacctacatcctgaggcgtggccacctgctttccatcacccccaacaccccagatccccggatccttctgatggcgacggctctgccggtctgttctggctcatgtgctgtgtgccctggcccgctggcactcagcttacatttgaacctcgtctttagagttaaggtcccacctgtgctgtggaccagacgtgggcctcccagtgagtggggggcatctgataggtgaggctgcttaggaagcctggcacaccctgtccctcagcagggtgggcctgggtaagtctgcccgccgcatgggagggagtgtggagagatgaagagatgagggagcccgagaacgcatggcctcacgtctcaccccaagggaggctctcaacggctgtggagccctcgctactccgtcttcaggcccctgaaggacacaggcaaccgcggacaagacttagttgctcagcggaactcactgcccctaccggtgcctctcactgctgatcttagggtcttggcattccttaggggcctggtgctccatgtgccccgtccttccagctggcacctcgggggttaagcgctggtggctgcacacactcatgctcccggctggggcgcctgcggcaccctgggggttaagtgctggtggccggacacattcacactccatgcccacgtggtttcctgcagctgcctgtaaggtgcagtttaaaaattcaaggcatgggatgattttgtgcagccgccgctcgaagctcagggcgggcacacgcctggtctgtgcagctttgcctggacctcccctgtgtgtgcgccagccgcacattgtggggctgggggctcgggctggcggggatgctggggtgcacatttgagtgctgcagctgcacgggcgggtggtgatgaccgtcacctggccagaaccccctgagaagctccacatactctttttctttttggattcagcagtccctttttcaaaggatttgttgttggctgttgtcttccagatgttcctcttgactccattgtgtgtagccttttaggggaacacgtgcttgttatctggtcttgacattcacttataatttggggctgcagaatgtggcgggaaccaggcacggtgctgcatgcctttgctcccagctacttgggaggctgaggtgggaggatcacagaaacctaggagttggagaccagcctgggtgacatagtgagaccccatctcaaaaaataaaaaaaatgggatatggcaagagccgtgaagagttcagctgagttgtcttgggccttttgcttcacctctttgtgaacttgctggcccccacgccaggatagggggccggcgacctcgcaaaggctgggtgcgtgtggacactccggggctgagggagcactggccagggcacaggcttgggtgggttccccctctcaggccagaccttgtgcctgttgtcacctgccaccccaactcggctgaagccagttcccagtgtccaaggggcccgagagctgggaggtggatccaggatcctcagtcacaggaacaccatgaaaaccgcaggacagttccctggaggcttcctgagcccagaggtcgtggtgtccatcctgggaatttataggatgccaaagaacgccgagaagcacgaggagccctggagctgcctcccccggggtcccaccgtctcaggcttcctgatcctgctcctcagcacagggcagtctgcccccggcctgaagcttcctgcgtctgctgtccttggctcgtaggatggtgtcctgccaggctggcagcatcttggccacccagggtggatggtggaggggccacgtggctgtgggcctgtgccagccctagctggggttccctctcttgtggggtctgtgctgctggccgtgctcccgtctcctcccctgccctgggcagcgcctgctcacgtccaagtggcttcccttcagccaggctcctttataccaaattctgtcctctttgtccttgatcccttccctgcacaccttgaaccctaggtcgagtgagcctggggtagggcccatgtcctctcctgccgaggctggtaaaccttagacttgcccccaccccacccgtctgtgtggtttgccgctgatccccagaggtctcgacttcatcccgaccgtgagaggccaccgcagtggtgcagctccctcctgaccgcagtgcagccccagggggccatcgctgggccctgccccactccacagggccacacagcagggaccaggcagtcacacccatggttggagccggtggaagtgatttccaggcaggggcaggcccctgggccagggctggggctggcatccgtggaggtactgggtgtgccagggcgcgtcttaggtggtttgtgtgtggcagggcctgggctctggggtctgtgtctgcctgtcctgctccctcctggccccggggccagcgtggtcctggagactgatccagcatgacctacctgtcgtccccgtgagccctgtggttgtggccagagtgggtagcggcatccagggcggctgtgagagtggagggagactcgggtcacggccaggcacacacagccacacacacatgctcacccgcataagcacacccgtgtacggttcacgcttgtgcgtgcccactcacataggtagacatgcacgcacatatgtgctcatgcccgcacacatatgtgatacctccccggggtctgcagtgctgctttcctcacgctgaatccctcttcacggtggccaggcccaggcatgtcatcttcgcaggcagagggtgagcaactgtgtgccaggcagcccttccgtatcttcccagaaagggaagccaagcccggggctctgtgcgtcccccacccctgccctgcggtggatgggatcctgccagccctgggcactgttctctggagaagcagccaggcctagcactacttttagcgggacacgtgtcacaggagccaggtgactgtcacctctgggtcccctcaggggtgcatgaatccctttcctcttctccctccacagaaatctgtgcccctgacacggagcgttcggctttgggaacaggcctagcagttgccagcatgagggcgggaatgacttgggagtctgggtggccaggaggtgcctgagatgcctgggatagctcgagaggcagccctgtgtgtgctgacccgggaggagggcatggctgtgaggtggaggctggcacaggcggttgggccctggctttgcggccactcaccagccgctgacgtggcctactctgtctgctcatctgggcggccttgtgggttgtgctgattaaagggaggtacatctgtgaagcacctggccctggtcagtgctcagagggtctgtggtcatggtgagaagaaccccgcagctcctggaagggcgagaggacccggagaggcttcctctgccagactcagctgtgctttgaggaggggaagtgacccaaggccagcccagccgtggtcctgggaggcagcatcgcccggttagggcttcctgcgtgtcaccgggggccttgctctggtttctggctgaacttgttgggcactgggcgatcctagtgggggttctgctcgctggagcgagaggaccctctggggcgtgggaccggcggtggcctggacgtcagcagaggaggaaagtcctgcttcaggcagccattcagggagggacaggaatcacccgagagtgacctgccagcagcaggggcggccctcctgctctgtttgtgtccgcagcacgtggtcagtgcctggcactggaaacagtagctcagcaaatatttgtccgtcaaaggagtacgggggccggaccacccagttccggcccctcctctgcagaccaggaaatggagccatttgccgcaggggtgggtctctcgtaccaactccagggttagcgggaggacagccctgaggggctgtggcatgcttctgtcccatgtggtgctgatggggggtgggtctcgggctctgctgatgagtatcagggctgggtcctggaacccaggctggctgcactctgggggcgcttctggggacggctagccagccccctgggctgatggtgtggtcgcacctgctggccttggcggtcatgtctcaaatgggatcacagctccgagggagctttggcagaggaaggtgggaaacatctgggtgaaaaggaagtgggccgtgctcctgtgtcttcgaggcctcggcccctcagctcctctctctgtgcccctctctttggtggaagcaggtagggatgcagcaatgtggtgaggcccttacagagtgggggactcagacccacatcagggtagcccagacacctgcgcccctggggctgcccccccgcaggtggacttgagccgggtctcgttgatgtccaggctgcaaaaggcctctgacggcgcttaccctgtgccgccacgattttgatttcttaatctgcattttgcacacgggccgaggagacatcagtgtccccaagcgctgcccgtgtgtccccagggccctcagcgatggcaaggcgagcccaggccagcgtgcaccagggtggctgcctggtgagcctatcccatggggccaggtctcctcagaccaccgcgctcctctggggctcaaagcggagatgttgggtgaaggtctcagaggtgctgtgggtctgcagcctgggtagtgaggtgtcttggagtcagagaggcttgtgaccagcgtgtgcccatgggtgtcccccagaggaggtttgtgcgctgtggtgtggggtcagcagactgtccacctggcctgaggtaggaggttcggagctcttgggtctctgcgaacgacagccggatgcgtatgaggacgcgtgtttgcgctcactgtcactcactgtcacgcctggggtgaagcacacacgggctcttcctgtctctcgcctttgcagagactcaagttccctcccaaagatgccaggcgtgctgtgcatttgaggtctggagtcccttctcattctagaattttctgtttccttttggtgtcccctctccgccctcccttctggccctgacaccccgggggccctgctgcctgtggtcacagggcttccctgggtggctgtcagcccagagtgggatgacggtggtgactgcgagcacctgactccctccccttccttctgctgttctgcttcccaggagacgttctcttccagatggctgaagtccacaggcagatccagaatcagctggaagaaatggtgagtccacccccagcgtggccctgcgaggaggggcaggtgcgacgggagagctggcgccacaccttggccgtgtgtccacttgggaacagtcccagttgtccagccacactcggaggcagggagggaccctggctcagcacacaagccacactcgaaggaggacgtcggagaaaagggcacaggccagaccgcggccgcatgtttcactggctgcagtggcagccatgacacgctgggctccagggagagtcctgatcgcagccccagccagaccccactcctggggttcacaaggttgcaaggcacacttcccctggcctctccgactgtaggcagaggcagaccccacacaaccagagcacgttgctggcggctggtttgcagcatcctgtctaaagccaggggtctgaccctggtgtcagttcaggcccatgggccctgcgacctctcagcctgtgtcgcagtgatccccagcatgggacagcagaggaaggaggggatggccgtttgtttcccttgtggctgtttggaggcgagattgtccgacgttccagactcctgttcagcactcgctcctggctccagagggtgcacacgggcatgcggggccacagctcatcagtcagggggagggggcccctcctgcacagccgggacacccggtgtctcgtgcccatccgctctagccctgccctgcctcctgttccgggtccatgtgttggagctgacggctgatgtgttttctctccatgtccagctgaagtcttttcacaacgagctgcttacgcagctggagcagaaggtggagctggactccaggtatctgagtgtaagtgcaccctggccgtgcctgctgggccctgtgcctgggctccggctctcccaaatgcctgccactccttcctcggcctgaaggcttcccacttccccgagctccccgtccacatgggccccagctctgactttattgtccatttgggaccgagtgcccctggtgtgccccaaatgcaacctgtgggtgaatccgttgcctctgacgccccacatgcctggttccatgccccggctttggccacttgcggtgaagctggtgcctgactctgctgccggggagtgcaggagctccttctctggcctctgcagttccctgggctctcggcccgtcctgccccaccgccactcctgtccgctggcaggaaggcttggggctgaggcactgcttgagggtttgagggtcacctctggctctcagtggtgggcgggaggggtgggcctcggccactttttccaagtgtgattttcatcttgggcgaccagagagctgctatggggttgggtggggtcgggctgaggcttcatttgggctctccccaactctgatttgcagctgagcatgcacggccagagagcgagccaggaagggagtggcagggctggcaaggggaccccgttgcgttgggctcatgggcctcggttttgctgccagtggtccgcgctgcgttgggttcatgggccttggttttgtgttttattgtttgaatctcaggctgcgctgaagaaataccagactgagcaaaggagcaaaggcgacgccctggacaagtgtcaggctgagctgaagaagcttcggaagaagagccagggcagcaagaatcctcagaagtactcggacaaggagctgcaggtaggcccgccacccccgctgtggtgcctctcctgccaccttgggactgctcacccctcggcccccctcgtccacagggagtggacagcagccccccaggtgcgatcagacagaggcaggctgtgtgtccctggtagacctcgggagcggtgggcctgacgcccccaggccggtgggatggtcggctcacctgtggggctctgtcctgctcttgcagcctcccagggtcactgaaaggttcttggctgaaggagcagaaacctaaatggagtcctcccctctgttctccccatccctgcccgggagtccggtcccagtttgttcctctaagcggtcgtggcctccgcctgcagggctggccactcgagggaaggtggtacttcaggttcctcgagggagcggcttcggtgttgtttctctcaccgtcccgccggcgtcaccggtgctgcgtgctgagtgggctgggacgtaggaaggcctggccgatgacaggcacggcctgatgtgtgtacaccagaacctggatggtggctgacacaggccagacccagaaacccctcgcccacttgctggggtcatagtgatacagaagagaaagaaacacaaaacaagatgcccagtcgtgtgtaaaggaaacatcaggaaaacccctggccagtcacccaggtagaagcttctgggctgcaccctggggtgggcaaggtgtggctgtgggtgaagcccgggcctccaggccgcacccttcctgctggcagtcaggttttcaagccttggcaagccccgcacacacctgcccgtgtgcgtgtgtctgcgtgtgtgtgtgcgaccgtctccttggtgccggatgtgggtgctcatgagtggctgtggcctcgccctgggactgggaggccggttcctgctcagagcctgtgcccccgctccctgcttaactgcagggaagccaagcaggtctgcccacaccctgcagaccaagccagaagatttccagtgtggggtcgcctggtggagctggatcggccccaaaggagaggacgggactaggccaggggcagatgagaaggataagtgagagtctgtggaaacagccatacgggggagctgggggtccctcgggtgcccgctgctgtttgcagcctcccactcaggcatgcttggtgcacagttgcagggacgcaactcaggccgttctctagggtgccctgccctctccagccacctcttcccgtgtccccagcctttgttttgatcctgtttttcactccaggtaagctgtgatgggtcttttgatcctttccgttttgcactccgggtaagctgccatcatgggtctttctatgatgggcccatcatggtggccttagtattcctgcctgaggctgctgcagcgagccgtcctcaagctgtttctgtgaacagaacctgagcagtgggcatggggagttgaggaggagaaataggtatatgttggtagacactgtgtctgtttttcttcttcctcccaccgtggaacgttttgctactttgctttctgaagacaagcagcggacggcacccctgcggcctggagggccatagccgcctccgagcaggtcaggacagtgcaggtgtgagccagccctgagcaccgaggccaggtgtgagagcttgtcttaagggggactttcctgggaatgtccccagcttggtgttctggggatggggatactgaggccagttcactgagggctcagctgcctgctgggggtccaggagcttgagctcccttctgccctcgaggctctgtgggtttttgctaacagcgtttttgagatataattcacatcaccagcagttcaccatttcacgggcacagtccagtggttatgagtgtttgcagctgtgtgtccatcactcagtccgttttagagcatttttcaatcagcagtcactcctgggcccctggccccaccagtcaccagcctgccattggcctccgtagacttgcctgttatggacattctgcgtagctggaatcccacagtgtccggcctttggtgcctggtggctcacgtggcacggagggttcttaaagctcatcgtgccgtagcctgcgccagcctcctcccctcttactgtcgggggtcagcctttcttccttttcatggctaaatcgtgttccatcgtgtgggtaccggaggctccatcctgctcagggccagggccgtctccctggcacggccggtactgccctgtggctgagctcgctgggagctggagatcgcggcggggtagcatagggccggacaaaggcagaggctgggggctgtcggagccactccccctccctcctgcaggctggagccagaggcctgaggcccccacgcagtcactgtggccctgccgcaccagctccctggttttcaggtgccctgcctcccactgccaggcctcttcaggagggccctgaccgcacacctggcctctgcctgccctccgcgctgctctgccgtgggccccgggtggtgggatttactcccgaggctgtgtgtgcacagctagctcctcaagcccatcccacacaggggttttggaagaccttctccttgctgatggctggtctgtctgtttgctgcatgtcctggcacttttgaggtctgttgggggaccatgttggtgcctcaggggccctggaggcaggtcccatctgttcttctcatgggggctgtgagccacctccagtgcctcggtggacccttcgttgactggcccaagggtcacctgattcgcagccacagggggctggacctggcggtgactcgaggggccttggccctgcctcagtgctgtggtccacggtctgggcaaggggccgctgctgggtgccccaggggctgactgaaccatttggcaacagaactaaggtggctggtggctgggcccgtcctggggccccttgagtgccctttcgtggtaagccaggtgacccagttttgggagtaagccacagcacctgtttcccaacggctgccacagtcgtcacaaagcccccctcgtccgcaggagggcaggcggagggggagagggagggggtcgtggccttacaggctgtctgcgtcctgatgggccagaccccggagcccggcagggtcaggaatgagggcagcattcccatctgtggctgctagttgccgaggcaaatggtccccctagcacctgtgagtgggtctgggcggggaccatgtgggcggagagggcaggcagggccccgaagcgcatggtaggtggaggttgcagtgggtgtgaggtgagggtggcccagcagcccccttggaaaggcctctgccacccggtacagagacgcttggcgagcctcatcttctcggcctcccagggcccctcctgggagatgtgtggtgctggtctttcttcccaggtcccaggggccctgctgtggctccccagccctggctgagcagcctcctttctctagaacttgcagctgctcctccccactcaccaggggacctgtgggtggccccaggctggactgtccccacctgggcacagcctcaaggccctggtgtcaggcttaggcttggatctggctctgtcccttatgggtcatgtggccgcagcaagccccagagcttctctgagcctcagtttccccatttgtgagggggaatatcctggctttctccctcttctgagcactgacgggaagggctgtagagccaggatgagccgacatcaaccttctcacggtgcctgcgtgggggctctcctggacggacctccgcctctgctcctccccatccgcctccttcctctgtcaatgggagacggggcttcaactcttaaccacacaggtgttttatttttgtggtttttcccaagtcaccgagtttcttcaggaagggctaggtctcatttctcctgcgtcccacttggtgccaagcacaagctggtcacgcagcagatagctagtaagtgctaagtggtttcgaaacaacattttggggtgggaaacagagggagccacaccccggtgtgctttctgctccccagtggcctggaagcccaggaggccaggcctcggagccgtcagcatccccagccccacatcggagtttgagggggtggggcacttggtatgtggctgcgtacgcgccccccgagctgcggggaggctgcggccaccatcctggggtgagtgccatgtggctgcctggctgggatgtgctgccggcctcgctgctccaggccccttgccccacccagggctgttcctgctggttcccattgcctttgcaaacccggccagcgggctctgtgggacttctactttagggtgtggccgctgggggcccagctgttgcatgtcctctccacttctgaagagaggaagcaccctgggctggggaactgggctggctggccccgcctactcatgtgcagccccgcccctccagtgcattccaccccgcccccacttgtgtggacccgcccccacttgtgtgccccgacttgtgtggtgcaggaggccctgcccttgcttgtgtggccccaccccttggtgcaggaggccccgtccctccagtgcaccccacccccatttatgtggccccaccccaccccaccccaccccacaggcctcctagctgtccctaactcctggcttgcctcgcggggtctactgtcctggggcctaggttgtcagcgaagtcctgctggttgcagggaaagggcctgctggaagtactcttgggggaagcagagacctcttcaccggcctctccattcctaaagcggttggttgcttcccagctgttctacagaccagcccagcagctgcaccctatgctgggggcagcccgggggtgtctacgcagagagtatagttcacggtgcccccttgagatccctgcctcggtccctggacctgcctgcccccagctcttctagctgtctccagtgtatgccctgtggggtcactggcgaccatagcagttgtccccaatcctgaagaccctgagagaggcaggtgtgcccacacgtcgttggagtgcagggcaggagtctggcccattcgggctcctggggctgctttcttgagcgggcaggagggggctgccggactgccggaagtggaagtgaccccacgcaagggtggcctgaagccagtgtccagccaggggcgtgagtagcagagaagcagatgcctccctgcggttcccaagctgcccctgccacagaggcctttcccttggagaccctttagtgcctctggggtctctggccctgcatgtccctcacctggcagcctagagctggccggggcctggctggtggtgcagccatgtgggtggtgcatgcaggtggaggctgttcaggcagctccacgggctggacgggcgcccccatctacagggccccccacctcagctgccgctgatgaaggggaggtggtggctggtgcctgactctggtctttgggggtgtagcatgctgtgtcattgtcagatgtgggttccctcagcgacccaagagctgggtgtctcgaagtgattgccggggtctccagtgggctcagaaacctggcgccagctgcaccccacctgagctgcatgtatgcggagcaccaggctcctgggagctgtgaggctgctgggcagcgaggctgggcccatggcacgtgtgaggggcggcttcatgctccagggtgcctacgaggccgaggcccccgatgcgcactgcccgcctccactgccgggctcattgtgtggcagcggccaggccttcagcctgagctgaaacagggacacaccacaccaggccctgggggcagaggtggggctgcagggaggggtgggcgtgaggttggccaggccctgccccagagaggcaggcagagtggatttctctgtctgcctgccagggtgcccttgagcggggctgggcccgggggcctcctgttgttcaagaactgcttgtaattgagatggtgttttgggatttccatgaaaagaagtaattttagttataggtcagggcactggggctaggaagcatttggggtgtttgttaactaggacgggagagctttacgtaaggggcccggcccggagcaccgccctgacggccttgggcagcggcaccttcactccccaggaccgtggtcgttgccacatttgctgggccaggtgctgacagacgtgcccgtctgcctggagggaatgttctccacaccacgcggggcacggtggacatgctggggcaggggacaccttctctgtgggtttatcagtgtgtccgcggggcgtggtcacagcctggtccagctcctccttagaacagaggggtgtggctgtgtccacagggcccggaatggggctgagagcagagcccagcctgtgcccaccgctcgggggcagggagcagggcccgggggacgtgtccacatgccccatcctgcatctggaacccagggtgggaggcgagtggcccacccactccctgggctgggctgggctgggctgggctgggctgggctgggctgggctgggctgtgggcacgaggacctgagtgtgaggagggagccccggcccgctggatgcaacttgtccttcctaacccatgtgcactgagggtggggcagccgggcccctgctcagaatcgcactgggcatgggctcgacttgctggccctgggacgaccctgctcagccagctctggaggcttcctcagcggcctgaaactcctgctgcagaggagggtagcattgccctgtccactcaccacctcctggggcttttctggacagagatgcccggggctacaaggagagccagggtttctgctgggttaccttcccctgttccctttctgagatgatgggggaggagggaggtgaggcaggtgcagccctcgctggccggtcgtgagtgaggagggagagatggccccgcatccctggggatgctgcctcccagagaccatgggggctccgtagcaccggcaggatcatcgtgggggtcctgggaagcggcactggtgctctgctcactgtaatgcagggggctggtggggggcattggtgcccccaggatcccccctccggctgccccccatctctgggtgtgcgaggcctatagcctggattgaggtctgagaaaggggagagatgcgtgctatttaaagggtgtataattaacacagcagagacaaagcaccctcgttcagatcttcagagaagataatagcagggccggtgatcgccagcgtggagtctggcgacgtgcggggggtgtgaagcccatcctcgttttcacaaagctcttcaggctaaggctgtctgtggacaacccctcccccccaccacccccgtgaggacagccgtgtggccatgtttctctggagtaacatctctgaggggtcctgaccaggaaaaacaggagtgtgaggagccaggagccacggagccctctcagggcttctgcatccgcagctgacacagggaccctcagtgtccccggggccagggcagccaggggtcgggcactctgcttccccaagcctcagggctgggccactcgaacatcttagcccccacttctcctgcatcttgccaaccctttgctggctcttggggacagcttggtctgtgatcctctagcctgtttgtgtgtctagcccactggtgtggacagaagcgacctgctgtctcctgtgcccgtgggcatgtgctcaccagactgtccatcccaataccaagctgtgggtctgttgggacctgttgttcctgggcaccccttgccaatctgctgaaagctctgggcctttttcccaggaaaatggggaccgtcagggctcatggatccctgatcctgccaaagtggcactgttcccttcctgaggatcttcctgtaatgccttccttggggagcggaatgaccagctcttccacctgccaccggggccagagggtgcggcttaccctctgctcagcccagcccgggtcttgctcagagcacgtgtgttcagcgtgagatttaagggtcctcccatctccttttaaccacctgccatgctgccctccctcctctgcctgggtaccgtgcccatcagcctgggaggcctggtcagtgggttttagagcagccactggctgcagcctgcaggtggccagtgaccatgtgctacttggggcacctgattctcaccccacacaccacagctgaccggtccgcagccgcatcctttcgagtaagtgttacccatggtgacagctgaaggccaagaattacgttctcattcatatgctgcaggggacctggggggttaaagaacgtgggaaagctgcagcagccgtggcggatgaggtaaaccaaagccgccttggttttttctggaatgcccctcccccactctgagtcaccgcatgctgcggagaggagagatgtgttctgatcacttttgtcttctctgatcacggggctgttcagcccagggtgactaagtgggagcattctgtgggtcttaaatgctttcagctgggtgtttccatagtgctgtcgccatggcacccagctaagcacgcagccggtggctcagcggcgggcggggactggagggggccagccactgggactgcctgcccatggggcaggctcagggccgttgtaaatggccgggctgccaggtaggaggtacagaccaggccgtgctctgtcccctgcactttccacacagctcggacgtgccccgtataggtcatccccgtccaacagcaggtcacagttggccgggccctgcagtgctggccgccacctcctctcctccccgtccccgcaccggccccttgtgtggtgaagctcctgcctggcctagatttccaggatctgccctgtacagtcgtggcctctctgtatgaggagtcagtgtcctggaacagcaggtgaggagaggcagctgtcattcctagacagagtggcagccgcatgtcatgcgctgactcaggctctgccatagccagatgctcatgtgggggctccaaggcaggaggtgtcagctccccccgtccttcgggggctggccatccctgccttgctgctctgggaacatctctcctccctgtccccaggatctggaggggccccgccagagcaccgtgcagccgtactttctgtctctcccccgacttcccctgggtttctcttgtgacctgtgtgccactcccagccatttacggggctcctttgagtaagtggaagacttaaaaataaaacaccaactctcttcccggccagggaggctgccgtaccctgctaatgaggccagtacccctcgctgtactctcccctggggaactgagcatgagcgtgagaaagtaccgtagcctaaaaacccagaaaccgcctgtagggtgggcaaccggagcagctccaggggccttagtttggaaggtgccgttctcagggtgaggagacccagggggccctgcagcctagtttacactgctgtcctggggtgaccactccaagcagcaccttctcttcccccgagtcctattcagacagcaaccagtgtggaggccgtggctctgggcagccccctgggcctgccttttctcagtgcctcagtttcttttgccaggcgttggatctcctgctgagtgctctctggccctgagctctctgcccaccatgctttccgggccggccaccgctggaaaagtccccagggagggcacagaatcctcatgatggggtgcgttgggggtttctccatggaacctcacacacattcctgaggctgccccacttaagggattctgggcaccgaatagctccctccaaagcaggcacccccatcacaggccactcagagcctggaggcgcaccccagcatccctggcagttccctgcgggaggagcggggcaggaccctgcaggcggccttggaacaggcctgggtgttggtctgagtggtgttgcaggggcatgggtgggtgctcatctccaggcccctccttgtgcacaagcccacttgtttctcggagcacaccctccccacccagtccctttgatcctgaaggtcaggaaaggagtccagcagccaggctgaggctggagcacagcgggctcaggtgtcctcctccatggctgcagtatgtggcgtcctggccacggccatcatgccctccccaggccccagggtacccctgaatctggctgtcgcactctaccccttcctggagaaggagcctcagaggtcactggaggttcttgggagcaggagcaggaagccctggtaggtgcatgttgcataaccagaggaaaagtacttcgcgctccagctgtggaggaggaggaggtggaggagaaagtagaggaggagaagaaggagaaaggagaggaggaggaggaggaggcagcggcagtgggggtggcggcagaggcctcagcatggagcagagcttgctggaaagtctgcttaaggttgccttgcagggcctctcacctgtgatcaaacttctcacttcctaaatgccatctcaggtcccctttaggtgaccctgtggccaggccctacagcgcctctggagggtcaaggcctactggggataggagtagcaagcccgttgttttgaggggcaggtggggtttagtgtgggaaagcagggtgggctgcaagggcaggggagcgccgggctccgtgttgggggatgtggctgggcaggctctggccttggggacagcatggtctgctcacactggccagcaggcagagccagtgcccggtggtagtgctgggaccgacccacaccctgccaggctggttctcacccctgtagtggaggcttgcgggggtaggcagccagggaacaggctgctccgctcccctccccgccgcccacccggcccggcactgcccacccacgctgagtcagagctgtaggcggggcggccgcgaggctgagtcaggcaggggaggccgcccccttgcggaggccgcatcttcttaagagccgattctgaactgaccactccttgacgggcaatcccggtggacggggggtctgagtcctgctgtggagggtctgcctgaggccggtaggggctcagcccaaggtaggtaggcacaggaggagaggcgagacagaggagagctggaaagaccttcctggcagaggagaagctggctccctgctgaagcagctagcctcctgcggcctcccaggaggggcctgggtgtgtccctggggacagggtctgtgcctcgggtgctcctcccttgccctcaccagccacccacagcctcatcagcgttttgggatggaaagtttccagcctacaaaaccggagagcccttgacatccagggtcccagtcgagccctcccactgtcgggctggggttctggaatcgggaaccccgggtgccgggtgtcagctgtgccatagggctgtggtgtcacgcgctaccccagacctcaggcacatgatccccaggccagctggggtcatggaggggccagcggggggtggggaggcatgctcctcccagagggacagaggcagagagccctggggtttggaactgtcacttccacctacagccctgttggtcaggtgagtcatacaacaagccctgcacccatgggcaggctgggaggcgcctctgcccaggatgggagcacagtccggggcctgggaggcagcggccgccctcagcttcttcgccactctctcccccaaactccccctctccagtttcctcccgaggctcacgttggagaggcctgggctcagctacagtttcttggtctggctttgcttgcactacttcttttaaagttttttttttttaaattgtgataaaatacacgtaactaatacagttgaccacggtaaccatctttaagtgcacagttcagcggcattagcgcattcatggggttgtgcgatcaccaccaccatccatctccagaactttccatcttcccaaactaaagctcttagtaccctccgtcctggtgtgttcagaatcggtagctggatctggaagctctgtcaggttgagactcagttttccttttggggaaatcattttggctggagcagcttctgtcgtctttgctggaaccctttctgggccgactgtgtgtccaccaagaagcacagagtggccaagacgtgacagccgccatggtcagagccagggccacagacgcaagggctgccgagcggctgaccgccgggtcagggtggggaccgcctgctggctgccctggttctagggtctggcttgactacctgtctttcctgtgcccaagagcacctgccagggctgagggttttccaaagcttccgcgtttgtctgggacacattctccccgtccccccatccccccatccccccatccccccatccccccatcccacggggacacccgggtgggcactcaggcagctccaaggtggaagggcagcaatcaggcctacttctcattcctggttccgtgctggcccctcacctgggcacaccctgttccgaaaggcgtgacctgtggatctgatcttgctgtccccgtggacgctggtcttgctttctgggctcccagtctccgctcggtgacctcttgtctgatcctccccacgaacttccttctcacgttctcccttggtgcacgcttatccggaaaccaggcagccaggtgtcttagcgtcccgctccccgtcattcagagccggagccgggtgggagaggagatgaggtgcgcccggagtcccctctgcagcagagggcttccctggggtccttggccactgtcctgggctccagctctcctgcctttcgtgctggggctgagatggctgagatggctgagatggaggggccctggaggcagaggcacaggtgagagtgctccaggcaacagggggaaggaccaagaagctgtcctggggcccatggagctggggcgcatccacacccaggcttctgtgccttggccacagggaggtgcacgcgaccccaccccacagcaggagccctgagatgaggctggccccctgccagagcctcctgctggaggcaggaccctccactcacccagagtggtcccggggcagggaagccttctggggatgtggccatcgggcatctcctgagtggtcccggggtagctgaagcctcctgggggcgtggttgtctcctgagtggccgcagatgctgttttgtttccagctgctctgcatgaatgagacgtgtcctttgactgagtccgtggggctgccccaaaccggtcctgacaggcgtccttccatcgctggctgagcctttctccctttccctccacagtacatcgacgccatcagcaacaagcagggcgagctggagaattacgtgtccgacggctacaagaccgcactgacagaggagcgcaggcgcttctgcttcctggtggagaagcagtgcgccgtggccaagaactccgcggcctaccactccaaggtgaggcggctgggggctgcgctgtgccggcgctgggccttgctggcagaaatgacccaggcccctgccccagccccagccccgtgaacacaccggggcagtgtccaggctcgaactctcgtttatttcgggttttcttgggggtgaagttctgggagaattaccaggtcacagggtgcaggcattttgaagactcacattagaaattgccacctgcaaccagggagagtctgatgggctttcaaggccttctagaacattcttctagaatgttcttggctcttctgccacagccatgtcctgggcaggtgcaggctgacgccaggcaggggacggtcatgctccgtgctgggtgccggagtcccggtgggacacctggtgggtggcctctgtgtcctcacttgctcttcctgtggcccctctatccacagtcctggggtacagcctctgggctcatggctctgctcacccgaggcactgaggacccccagccccaagcctgggtccccagccacccaagaccactgtgccactgggcccctaggccacccaagacaaccatgacactggccccaggtccagcagctgccatagctcggctgtcgtacgtggacctgccacccctcacccaacccaaacctgccctatctctttgcttcctgggtagccaggggccctgcctggctctcaggtggcctccccagtccctccctcactgctccagagtggcctccctgggactcaaacctggtcacagggtcctcccctggctcccaggctcttggtgacctgtgcctctaccacctctgcctgcacccctgagccactgtggtcccaggtggggccttgggtggtggccacatgctgctgccctcgtgacctctgagagacccctctgcccgtcatctgttgagggcccctccttgggccggtagactcttggccctgtgtttcccgctaggcgtcccccggcacagtcctgcggccctgtgtctcccgctaggtgtcccccggcacagtcctgcggccctgtgtctcccgctaggcgtcccccagcacagtcctgcagccctgtgtttccggcatccccagccttgtcgttccttgtgggggaatcccgccctgggatccgccatgtcccaggaccaagcctggccctgctgaaccaggagcgagttcctcagggacgggctgcagcagccccctccatggatatcctgagccccgatgtgagcaaggggatcccctcctaggaggctgacttagcccccagagcaggcaaggcccagaggccagactccccaccgggaacaggcagggccagcaggcccctgttcacccatagtccatgggtaggagttgggatgggatcacatgtgtcccctggaacattctggaacatttcaagagtttcgaagatgtagttccggagccaagcccaccagggaggccctggtcatgtctttctaaaataaagggttgcagggatccacgggctataccttgacacttgttccccccacccaccacactctcatgtacgtgcgcgtgcgtgcacacacacacacacgcacgtgatacagaaccagtgctccagtccccacagcctggggacagccaggagacaagtgctcttccctccctggagaggcccctcctgccggcctgggcctgctgggcactgtgggcaggtgcaggcaaggacagcagcagcacctttgacccctggaggcagcctcgctgctgaaggactcagcggtgacaggctgtgctgccacagctgccaggcagggagcgctgtggagcgcaggcctcccgcctgctagacccaggacagtggcgggcgtctgcgccctctggcgggggccaggccccatgacggggccagggagtgagagcggggctgtcagtggctggggtgctgcctgcagggatggagggcggggaagccaggctgcttgccgcaggtctcccaggaggggttgcgggatgtgcctgcggtggcagcagctgacctcctgggctcgtgggcccccgggcgtgtgtggaagaggcctgtgtcccacagacccacttagagacgagcctctgggctgggggccagggtgtgagggcagcctcccagggcagttcgtagtagctccctggtgcttgggtttgggcctgcctcggggctctcagggtgcgggggtgacgctggctcgtggccgctgtgtcagggccgtgccgctgcgaggtcggtgtccctcggccgtctgccctagtgctggtccctgctggcctctccgcgccacccaagactcactcctctaccactgatctcagccagggctcggcagacgttctgaagggccacaaagtttgtgcttttggctctgtgggccgtgccgtctccagctctgttactgcaatgtgagggcagccatgaatgaatgattcacaaatcgatgcacagctgtgttgcaataaaactttatttacaaaacaggaagccagccctcgggctgtggtttgctgacccctggtctgagccagcagcagaggggtaggggtggcatggggaggacttgctcagaatggctgtcgtccaacatcctccgtgggtccccagcgtgggtgcccagccacatgtagaagggaacggggatgagttggggggagcagtgaaagccggagaggcccccagaggtgccagagacatagcagttctggcccacagcttaagggtctgggggtcccgggaatccaggccctgcagcctgcttaggccaaatggccaggaggggcaggggttacttgattagctcccaggacccaggcccggccggctcccagtcccagaacctttctccatgcctgtggcttcctcctcctttgtccccactgtgctcagctggtctgtgtccagcaggccgcagagtacgcccgagggagcgcgggctcttgggcccaagggcagtggttggagcagtgagcctcagtgtgtctgacggggctgccttcctgccctcggcagccaggcctgacccccactgggcagcaccaccccctcccccggccatctggggcgccttcctggcactttggggtttgcccaccggagtttgaccttgtgcgtccctgtccgttcctccttcctccaggccctgatgggccccgcgggcgttgagcctgggtttgctctcatccctggaggtcccccgactgcatggcttgtggtccatccccggccctttaccggcagccgcttctgtgggttggggtcagaggctcacgggtggcctgtctcgccgagaggtaccacctggtgaagagcagcctccagccccagagagtgctcagggagggccctcagcgctgtgcctggctgcaggagactgagccggccctgacccctcccttcctgctgcttccacttcagggcaaggagctgctggcgcagaagctgccgctgtggcaacaggcctgtgccgaccccagcaagatcccggagcgcgcggtgcagctcatgcagcaggtggccagcaacggcgccaccctccccagcgccctgtcggcctccaagtccaacctggtcatttccgaccccattccgggggccaagcccctgccggtgccccccgagctggcaccgttcgtgggggtgagtctgtggcctctggaaagcttcacgggtgtgggtgggagggcagcttgttgtcagggcggggggccgccagggtgcagagtccaggggcccctgctgagggggcggagggttctctttccccctggtcttgcccggggtgggctccagcaacagcctgctctgcctgcttccctgcagcggatgtctgcccaggagagcacacccatcatgaacggcgtcacaggcccggatggcgaggactacagcccgtgggctgaccgcaaggctgcccagcccaaatccctgtctcctccgcagtctcagagcaagctcagcgactcctactccaacacactccccgtgcgcaagagcgtgaccccaaaaaacagctatgccaccagtaagggctccgctggggtgttgggctggggtccctggacgtgcctcctcagaccctacagtcatgccacaaccctcaataggggcctgggagaccctgaggctcacaattatgtgaccgtgtgtacctacatgcatgtggtacacacacgtgtgcctgcccagcatccagctccctcttgtcaagcctctggtgctcagtgggggcatgagtggggtacagggttaggctcatgcaggcagcagccacttgggagcaggtagctgctgctgcggagagcttagccagcccacttacccacctggggcacaggcggctgtgctctcagcacctcaaccagactccctgggctttgctgccccgccagccaggggcagtccccttacctgtcccttgtcccagcagccgagaacaagactctgcctcgctcgagctccatggcagccggcctggagcgcaatggccgtatgcgggtgaaggccatcttctcccacgctgctggggacaacagcaccctcctgagcttcaaggagggtgacctcattaccctgctggtgcctgaggcccgcgatggctggcactacggagagagtgagaagaccaagatgtgagtgtttctcgggggcgggctccaggcagccgctgccttcagcaagtgtgtggggcagcgacactcaagtgcactgagaccttgtgtttagagtggctgtgcaggttgcgggtcctcgccgtagaagacctgggcagtgagagcaagcgtgacctggggtcttcgccaccaacaggcgtcttctcccctggcaggggtcttcgccccaaccacctccctgcaggggtcttcccctacaggagggatctccccccaacagcagggatctccccccaacggcagggatctcccccaatggcaggtatctcccccaatggcaggggtctttccccatggcaggggtctccccccaatggctcgggtctccccccagcggcaggggtctccccccagtggcaggggtctgccccatggcaggggtctttccccacggcaggggtctccccccaatggcaggggtctccccccaatggctcgggtctcccccacatggctgttgtcttcccccatggctggggtctttcaccacagagtctagtgaccaccttgctccatcgcctccctgtgccactcagattgccgcagggtgtggcatcccacacgtgtacacactcagcacgtccagccgaagccctgtggtgggcatcagtttcccacagttcgcaggtgcagagcagggcttggccatcctgagaccgcaggctttctgtggctttcagctcttccacatgccagacgggctctccagtttggagttctagaagtcacctatggagtcagatgggccacacctcctcagtttactgaatgctgttgcagagaggctgggccagggtgccaccctcgctggacctgggggctgcattcccagggctgtgtttgtgcgggtgtgtctcttggcaagatgggaaaaggccctgacatttgtgccttcctaagcttggccttgcagccatcactctgaggagggggccgagggcagggggtctcccaggaggctgctccatctttcttccagtggccactccaatcttggtgccatccgtggcttagcgtgacactggggctgcgaggcaggagcaactgctctgcccgggctctggggccttgcagttgggtctggtggggccggcagctcccaccaggttgaggacagcccgggccaccttgcccttgaggctgagcacacagtgggagcgggctgcggtctttgtctccctggagcactgtctctgttgctccagagacagccgcgcagccatgctggggagctagagggacttgtgcatggatggtggtcggtgggggatggggagcctctgggctgagcgtggctcttacctggggcctctcttccaggcggggctggtttcccttctcctacacccgggtcttggacagcgatggcagtgacaggctgcacatgaggtgagctctgggcccaacgggagtgtaagatccccagctcgggagaggggctgtgatgacaccaggtccctgggcttggattgctcggctgggcttccggctccttgtctgctaccgcagggccatccccagtggccctgagagctggacgcttgaggccttcagggtggaggcatggtggtgccctgtgcagtggggcccgagagccctggggacaccagagcaggcagcaggtgctatgggggcagctcctgggggccaggtgtgcaaggacctggctgtcccaggtcctccaggttctcccagccttcagagaatcgcagctgaaagcggggtacatggctactgggagggtcaggggttgctgtggcagcccagcccctctggagtcctcccggcttagcttcatggccaggaggaggaagggaggccagactggcccggcccatggtccccagggctgccgccttggcctgagagcagcctccccgcatgtggcgtgggctaggtgagggcgggcagtccagggagccacagggttgtggggtgttgggggcatccggcctgctgggccgcctctgagtccctgtccctacagcctgcagcaagggaagagcagcagcacgggcaacctcctggacaaggacgacctggccatcccaccccccgattacggcgccgcctcccgggccttccccgcccagacggccagcggcttcaagcagaggccctacagtgtggccgtgcccgccttctcccaggtcagtgggcggggccggggctgggaggggcccgcaggtggaacagtgggctcagcctgcagtcccccgttggagcctccgctgaggggcggggcgcctgggggtctgggtctttggacagccctggggtgaaggctgcatgatttgggaatgtgtacacacccctgcttcggcctcaggctgcccgcctcgccgcagcaggctccctgtgtcggcatgctggggctggggtcagcctgtccctcatggtgccctcagccagccacgggcaactcactgctctgtccaagggggcagcgtctgggctgggaagtggctggcctagaggtgggcctggacgccgccgccttttgggagagccaggggggcaggatctcttccgtgagaaccacggggctccctcagtcacatccatgagatgggagtgcttgctgctcagccctggcatgtggctggaccccttccagtcagtgtgaccctggatttgggccatctggtgccgggaggccagaggtggaggatcagggcctgggtcctaggccctggtgtgggttctcggaaacccgggatcatggcggtcctggtatctaggctggggcagggtgtgagcgtgcatctcaacttgccgggttccagcccgctccgtccagggaggctcctggggttggagagttggagacccctgtctgtctggggctcctcagccagaggtccagtttgtgggatattggctgggctagcagctttgttcccggggccggtctccagggctgggcctcaggcagtgagtagagagaagaagagaacccacctttttccgagataacaggtagcctgggtgactactcagctattgacccacaagtgaggagtccctagattgacagcctgagctgaggccgcaggaggcaacctggagaggtttgggctctgggccgtgggtgttccacaggtcagcctctggggtgggctcagtgctgggagagccaaggaggggtctgcatctgccctaggccgcgggccaggccatgctggcagatgaagggcacagccagccccagcgccacacctgggcgctcctcccaggcagtgtcaccctcccaggggccgggatggtacatgtgacaagtttccaggaaactgcagctggggtctgggtctggtcctgggtcctacaagcaggcggaggagtcccaggggcccgcccaggcatgggtgaggtgctgcaggtgccctgcgggggcctcggctccctgggggcaggaggaggggtctcaggcggccagtcttgcatctgtttgggagtgtgcaacaagcacacaaattgaggtggccgctggctggaggaggtatcccctttaatttgggcagtcattactttaccactgggaccagggctccaggcaggtctctgagtgctgcagccaggagatggggagccttccaaaggaacacggtttgaaccttgtccaggcaggatcaccatttgtgggtgtgtacaggcagcgggtgggggtgaccacaggccccgtcacccggcctgacatgtttctgcctctgcccccagggcctggatgactatggagcgcggtccatgagcaggtaaggggactttcagacctgtctttgggaccgtgggtgggtgtgaagaggccgggtggggcaggtccctctgctaggacctggggccacctcttttcctttagggcccagcctggcccttcacccctgtcagagccggggatgtcccttagggcgtcctgctttctccgagtgacacgggaacccccctgggccctgcccctctttcatcgcatctggccggccccatccatccctgtcaggcaaggttggggagggtagctgaggctggcatccatggctggggctgcagcctcctctgccccaatctgtgctccgcccttgtcctgggtcttcctggagggtcaggaggccaacgggagctgctgaaaggggcattgctcggtgctggcggactcgccgcctgtggctgggcagcgtcgtgcagccaggcagccgtcctgtgctttgtttcacagtggcagcggcacgctggtgtccacagtgtgaggacgctgaccccgggcagccgctgctctgaagagcttccgcgccttccccctggtctcgtccgttttcctcctcagctctcgctggtttgttcttgggttgtttttcttttccacctgccccatgccttttggttggtgaccccagactctgtgatcccccagggtccatggtgctgctccatccgccccccctcccctgtgtttacgcgccccatcctgtgtgtcccagccttttgagcagaaactgccaggcaggacctgctgggccgtgcggggcaccctcggcctcaccctgcagtgtctgtggcactcactgcttttctaaggctcgccgtgagccaggtctaaagtttgaagaaaaagaaaaatcttaaaaaaaaaaaaaaaaaaaaaaagaaaaaaagaaaaacaggaaaaaggactttttttttcctgaaaaacaaaaaccgatctgcatggactccggtgtgcgctgttatctcgcatccgacttccccggtgcgatggcctctgtccggacagggaaggtgctggggtccctggccgccccggcccctgtggaggggtgcacagagaaagggggctcgtgccaagctcgaggggcctcctgaggaagccggccgctcctgtgagggaggccgggcccgggcacctgagggcttctccctctggacactgcgggccaggtgtacatagagcagcgcggcacagtggcctcacctcccgtcgggcactggcgggagcaaggtcgggggcaggcgctgcccagctggccgcacacggacattccaaagacctccagagaccaccccacccccacattcctttgaccagccttgtgagggcatcgatgctgccccgggctacctggctgctctgggcagggtgtgcgggccgggcccggctgggggagggcagctctgggcacgccgcacccacgccccccacctgggggaaacaggcggttcctgcccggttcttcctaaacgctctcgtctttttgtgtgtcttggtgactttagaaacaaacacagtggactcagtggctactggtattgtctcttcccacactgaactctggggaattgagtgcagggcacagcccggctcagcctgcccgctggtgggagcccctgggaagctgcggcgctcctttatctgatgtggtttagtaaaagcctcccacacacctccccgtggcctgggacgtggctggtagtgtttgtgtgggaagcagctcaagacgcggaccgcgtgacattaaggagagctcaagggcggaccgggccctgtgtagagacccttccgcgccggcgttcccgctccgctaaagatttcaaatccaggggattccatgctcaatggatgaatgtagacacaaaacagcaacacttgtatgaagatgtaaagtgctgaacatatttttttcctgtttcctttccttttttttaaaaaatctgaattgtgccctgtactgcagttacttgtttgaataaaagttttatttattgcacgagttgggtatggacctccttccggttcccggcgtgcgtctttgccgtgggggccccgccttgtgcccacctctgccaggtattttctcggcactcagtcgcctgctagataacctgggcttgcacacggtgctggccccagtgacagtcgctcactctgcccgggctctgcggggggccgtctgcagctgaggcaggctcctggctccctccaggcccgcaagtgaggcaggctccgcaggcgccgtccagggagagccagagccccagctgtgtgccgactccgagtgctccagggttctaggtctcctggcagctcgcccgtggtcccccctcctctgcacccccgagtcctcagaccccatgctgcctccaactgagccttgtgtttccttgcagcgccgatgtggaagtggccagattctgagccgcctgactagagttagtaagttgcctggcgttctcgtgcagtcactggcctctccagtggttctccacgggccctctggcctcagtcacgcagcctgggtggggagggcccggctgcatggcggggccaggggtccactgagcctgcctctcactctgggtgctgggccttctctactgggtcccctccttgggttcatggtatctttctcccctcccggaagcttgtgggctctggctggctgtgcccggggctcctctcactgctgggtgtggctctggccctgaccttctgtgtggtcctctcctgccctgctgggcgcttcaattatagtcaaagggtgaccccggcaagcagctgcagcccgggcctttcccgcctgactcgcagcgccagcttgggctccttcgggtgtgtgtgcctttggggctgacagccttgtggggactggaggtcagggtcctggggagaaccctggggagctccataggcactggagccaggtgttgggcccactggggaccgggctgtgctgttagtctgaccttgcctcttctgtcccccaagccccacaacgtggacccaagacactggctccatccctagtgtggatctgcagacctggagggctgctgggtccaggtttgagctgacgctcactccggggaccacagggccattatgggtccaattccagtgggactctggagtccgggtctgagtccatttcctcacgggttgagtgggccactcccctggtgcctggtgtatatttgggatgtgccagggtgtccaggagcaggccctctgccctcatagggggcccttgcccacaccttccaatcgcctacacctgtgtctgggcgggtcctgcttcccaccacccttccatccccaagttgctaggagggcggctctgcaaagccagtgcctgcatccttcacaaaggacgttggtccctgtgtctccctggtggtcacagcaggcatcctggcccacgggcagccaggccacaggcagatcatggatctgtcttctttcactgcctttctgttgttgattttcggcaacaaattctggaagattaggtagaaaaatgctcctgaactttggggactggatggagatgctctgggttggccctggccaccaccttgccttccgcctccatcttcctcccttccgagacgctgtttctgggaggcctccagacccccccactcccccaggtccctctgagctgagggggctgaactgcccttacctggtgaggcttggaaggggtgaaggctcaaagatgaggctggcacagcctctgtcagggaccacgtcccttggagggcagagaccctgggtagcagtgccggtggggcagtggtgctcagccccagcaccactccacagtgccaggggccagtttcccggccacgcagtctgcctggtctgacaactcagctgggattgggggtgtcgaaagccacttgcagttggccaagagactccccaatcccattgccaccctgtcatgccccagctttgggccctgggaagggggccttggaatgagagtggaggggcgagcgtccctggccgctgtccatactcgtcagcggaggcccaagcgcccacgctggacccgattccagaagggcccaccttctgaagacacgaagaaacagctgacgcgagaagacagaaaacaggtgctgtccgcccggctctgggtctggagtcacccaactggtcgaaatgcatttgtgacggctccgtttcttctcggaatccttctgcttcacattcaagtcattggtgaagctgccgcttggccgagcgccgtggcccacacctgtaatcccagcacttagggaggctgaggcgagaggatctcttgagcccaggggttcgagatcagcctgggcaacctagggagacccccatcttgacaaaaaaaaaagttaaaaattagccaggcatggtggcacgcgtctgtagtcccagcttctcaggaggctgaggtgggaggattgcttgagcccagaggtggaggttgcagtgagctacaattgcaccactgcattccagcccggaagacagagcaagaccctgtctcaaaataataatacaatttaaaaattagaaaagccaccggtctcccctgcggccttgcttaggggcctctgaggggaggctctctgtgaggagacagagcccaggcctctgcattctgaggccagcgccctgcccgcccaacagctcccccacacatgacgcaggccctcctcagggtcctccgctcttggacacgtctggtgactttcctttgctggctggagaggtgctggtggtgtcattgggtagttcgtggcaatcgctgcccagggccatgtcctgcaggaggtggggcctggcacgtgtcctccggcagggaccaatgtctgtggctaacgtgtggtgaccttgcagtggccttgggctgcagactttgtcatattctattggctcagttaggcccccactcagcacagcgagctccccgccggcctcctgggcgcgtctttcccagacagctggggggtgggggccagggtggggaaatagggacgcccagcccctccttgtgggcctgctgtcccagccagccttgggctctggcctgcgctctccccatccccgccgacccccctgcccccgtcaggctgagattggacacagcatttgcagccccagccccagggtcctcagagccacccagtgtggatggttcagcacgctccacctggtcccactgttctgggagacaagaagagaaaaatgcaggttagagaacaggcctgcaccagtggagggcttcctacccctgcagctccccgtggggtccaggcaagcgatgtgcctttgccactgactttctgatgagaatcggctgtgattcggggcaggagtgagaaccacgcggctgcactgccctcggctgtggtctgggccagatctaggacccttctctgggaacccacttttttttttttttttttttttttgagacagggtcttactctgtcacccaggctggagtgcagtggtgggaacacagctcactactgcctcgccctcctgggttcaagcgatcctcccacttcagccccccatggagctgggaccacaggcatgcaccactctcccgcacctgcctaatttttttttttttttttttgtagagacgggtacgctttgctgcccaggctggtcttgaactccagggctcaagtggttcctcctgctttggcctctcagagtgctgggattctaggcaggagccactatgcccagccagccccatttctaatctccccagagctccctccggaccctgggcctgcggaggaactcgggccacagagcacttccttaggagtgggtctagcctggcaggcagacagggcatgggcagacatcagtgatggaggtggaatcctcaccagcgggcccctaggcagcccctacccaggccccaggaagggcaaagctgcaccgatcaaagctgaaaaaagccggggatccagcagaccctgaggctccagcacgttgagagtagatcaaaagatcctttcagcagggtgccaatgcttagacgccatctgggagtctgggagccttccgcagacctgtcagtctcttccacgtactttattctcttaaaaactcagtctgtagtgtttcaagttcttagaaaacacaaagtcctcaggaaagcttagggagctgcctctgccctgtgcctcttcctgggcagctggacggaaccctgcctgcccaccccagggtttgcttccggctgcctgtgcctcttcccgggtagctggacggagtctgcctgcccgtccccagggttgttcccggctgcccgggctcttgtggacccagctgtgccagaggtgattctgctccaggtaatggctccagagtccaagcacagctttgccagagcacagtcccgtccctgctgcgtcttcatgtccacgtgccatctgtgctgtcacccttggagctgcctgacatcccccatcctgtcctgtgctgtcccctccgggggtggggactccaaagagaaaggctcaggcatccctctcatccgtgctcatcttgttccatttcaacttcttgtcttgagtcgtatttgtgcatcagctgtggccccggggatatgggggagggcgcggcacccctcgggggacaggtggctgagcccacagcaggtgaaccactgtctggcccaggggatggccagctgctctgcagggcccatgggtgtccatctgcagccctgcgggagccgtgagcctaacctgccttctctggatgcccccatgccagggctgggctggacgctctgccacgctgtgtccctgggtgtgggcctggcctggtgggggagccaccaaactggtgtgtgcccggttcaggcctgtcttgaatccccagcctcagtggtgatgtccgcccctcactgggaggttgtggctggcctgccccgccccaccccgccctgccctgcccagcccacactgctgggagggtgatggatcggggtgggggcaccctgccttgtctagggcacatagtggacttgggggtcaggcagccttgcagacagcgcctggtcctccctgccccgcaaagcagcgtatattgtctgtgagctctgtgccctgagatcggaccgtaggcatccagcactggggaatccctggggcatcgggcagcccaggtggcacaattcacccatggcttccgccctaaaaattaaaaccacgtttttctctttcaggaatccctttgcccacgtccagctgaagccgacagtgaccaacgacaggtctgcccccctcctcagctgatggccacatctgcagtgctgcccatctggtggcttcccccgcccttcccatgtagcctgttctgtcatcatctgtgcgttcctgtgtagagaacatccaggccccggctgcctggtcttgccccacttgagtctggcctggactggatcccagctgttctaggcagggccgggcagagtggggcgcaggcccctgaagggcgagacccagtggctgggctgcccagggctgaggggccgcctcttgagggtacacgcctctggtcacatggccatggagccttgggtacccctgagttaagggaggacatttggccagctggtggctgggaggggagcctggctgccctgctgcttctcctgcctaataaacaggcttctcctgcaccaggtgtgatctgtccgcccaagggccagaaggccgggagcacggggatgggagcgcccgcaccctggctggaagatgaacttcccgtaagcacgtaattccctgcaggtccggcagctacacctggagtgtggggcctggtccctccccatgcccctcggtggggctctcctgggcccctcactcccactggcaatgtcacaagggcctccccaggcccctcctgcctcgggcaggccccagccctcctccttacccaacctcccatccagaaccttgctgccagggcctcccagctcgctcctgcggccaaaggccagctgtcaggtgctatgcggggtcaccagcagagtgcccgctggcaggtgggggcttccccgcttccggggtctgccccaggactcctgggtggacctcccccccccacctccgctgactcctgcaggcactggggagctctgctggaattgggggttttaaaacttcattagcagatttgtgctcttccatactgtttgtttgtttgttaggtgaaatacagtgtggtgagctgcactggtgacaacagcccttacctggctggggaggtgtctccagcagagctcactcccgcctacagccactcacaccccggggacaggaagctgtagagttggcgggccaggagggcagttgagagctggccagcggagggtgcagggaagcccagctgtgctcaactctcctgcctccgccttccaccctgggcccagggacagacagacattgccctcagaagggcagggaggaggctgtcctggagaggcctgtaggtccattcttcacccgtccctaccaggccaactcggcctgcaggaagggagacctgcagggcgctacccctgcgcccccacacacagtagggccagaacaccatcccctccaccggggtgtgccgaggacagtggggaggagaggagaggggcagcttcctcctggccccaggaagggctggcatcgggttcctggcacagcccctcctgtccaggactttatcatcggcagacctcagaagacaacacacaaaggtttcttttgtcttagcttcatttctcttaaaaaacaaggaacaagaaaacattgcaccagcgttctaagcctcaaacaaaacacaaaacaaatccccctgcgaagcaacaataaactttacatctctttggcaacaataacttaaaatcacccaacttccattcgctccaaccacagcagttagttagttacaaaaatattccctgtgctgccctgcccccagctccaccccttccccaccatccctctccctgtaggtaggagccccccaacactgactgcggggcatggcccccactctcctttggcagctggggcacaggaccagatactgccccacagaggggagctgcctgcacggtcctgccaagggcacctctagaacggggcccacggggcaggagtacagcctggaagcccctccacccctgatcttttgggctgcccaccgtggccacagcgggacccaggtgggagcagcctgttccctgtgggaagggtgggcttacgggtctagctgagtcagtgaaggggaaacagccacggactttgagataagggcagcggaaacaggaccgacacgggcgcccagggccactccttgccctgagccaccaggaaccaggcaagggtgggggcacagggggtgggaagaggctcacaaacctgccagtgtctcggggccatgcctcgtcctggtttaagtgtcctgtgagcacaccggaggagctgccggatggggcatgcgggtcctccgaggccaggcaggcagggcagagggtgggggccgccgtgcccaggggcactggccccttttgagtgtgtatgtgtgtacagacacccactgtggctccaggcgcccccaggggctagcagcaagcctaaaagcccagacgaattctgcctctggggcggagcatggccgatctaccatccagggcctctcatcccacgggcttctccaggacaccgcgtggggcagaggcacctgaatctgctgccaacagccaccaggacgtggtccccaccttctcggtcaccatcctcgctgctgcctggcaggggctccggtgacgccagccttgaggggcaggagctgcccaggtctcaagcctctttactctcacccccggcaccagcttcaggtcctggcaagcaggacaacaaagtgaacacagggttctgagacaccagggctgcctcccccgcaactcccacctggcctccatccctggcccacatacaggccgggccccttccctgcagcagatctggctgtgtctaggtgagagatggacccatttcccccactcctgtcactggactcaggccaacaactctcagcaaatgcctccgagtcctgttttacgcataaggaaactgaggcctgaacaggaaggggatggccaaggtcatgcagtggcctcctggtgacctgcctgcttgttcagccacacagggggcaccctgcaccaggggtgaggctgacaggcccttcccccagggctgcagccacaggccaggacagctagggaagaggaagctggcagggggccttctccgaggaggtgggcacttgtcaggcacgtgggcagaggctgtaggggtagggacacctggcagagatgagcccagcctggggtggggcggatagtggagggccatggccgggagcggtggctcaggcccccagcagggctccacctgggcaccgtggggccggggcaccgtgggacctgggtctgcagggacttctggctgggaaggttccggtgagagggcctgccgcaggtctgcggggtagggtcaggcagaggagagccgagtgcaggggccaggtgagggccaggtgagggtcaggtgagggtcaggtgagggtcaggtgagggtcaggtgagggccaggcgagggccaggcggggtccaggctaggtctggggccgggaaggagcggggccgggaaggagcggagcggagcggagccggggctggcccggcccaggacctagacggaggggccccaccctcggagctccgtgccctgcctcccgcgtgcccttctgccacagccccgcccaggcctcacctctcttggactcggcgtccgagtcagacacgtgcgtgatggagaagcgggacgtgggcgcgggcgacaccgtgaagcgcgagaagggagcgggcgtgggcgtgggcgcagccggggcgggtgcggccgggtctagggccatggcgaaggctgccttggccgtcatcagcgggaagtcgtcgtcccacgcgaacccaccacctgcagcccaggtcgcggcgtcactcgcgctcacagcctgggaccccggcccggccccgctcccacagtcacgggcccaggccccgcctcccatcatgtcacgggcccaggccccgcctcccatgatgtcacgggcccaggccccgcctcccatgcagcacggacaaggccccgccttccgtgacgtcacgtaccagacccgcctcccatgacgacacgggccaaagcccgcctcccacgcgtcaaggaccaggtgctcctcccatgatgtcacacattaggccccgcctcccacacagcacggaccaggccctgcctcccgtgacgtcacgggcccagccccgcccctgctcaccctcttccgctgtggagccatttggggagccatcagcctgctgcggccggttgggggcgctgggagagccggggctccccctaaggaacgtagggggcgattccttggcgcccgggaagggctccccgagctcccgggtggggctttcctggaggaatcagagagcaccaggtagctcggccgccaggagccgcggccgctcccaccccttcctgcgggagcgcgacccccagccccgggcagaccccgggtggcggcggcccacctggtcaaagaggtagacggtgacgtcgtcgaagaaggacacggccttcttcttgcgttccaggtcctcgcagaaggtctcggacagcaggctgggcatcttgagcaggctgcgcaggttgcgcgcgctctggctctcagccaccaccacgggcaccgccggcgcctcctcttcgctgtcctcgctaggctcctggacgctgtagcagcggagctcctcgtcagactcgtcgctgtcctcactgtcctcctcctcctcctccggccggccctccaaggccgcagggaggccgggcagagccaggcggagtggggctctgggggtgcctgggccccccatccgcttttgtggggccggccctgacaacagtcctgggggcccctggaactcagagctgttgccttctgatctcagcggaaccggggtcagcaggaaaaactgggagcagctggggctgggcccaggccgcaccttggctgggccttggggctccggaggctctgggaccaggcccgaggggcaggtgctgggctctggggaggacccttcaagctgcagcagtgggggcagcacctccccggggccagagccttgtgcctccccggaaaccccaggcctgagacagacctgctcagacggctgcccagtgctcggcaggcccagctctggcccgggggctcggtccccgccgcacttcttctctgggcctgaggtggcctcggcctcagcctcgaggtctgagaagtaggcagagtctcggtagggattcttctcgttgaggccactgagggaggtggagagccgtgtctcgggcccggggccctcaccctctgaggccagctccgcaaaggcctggggctcacacccttcctgcgcctccttgagcacaaactcaggggactcatagttctcggtgtcatagccactgtccagcgctcgcggctgccctccagaggggccagtggccgacgggctgaagacctcatagccaccatcactggctgaggacgggatgtccagggagtccagggagtcgggggtccccacctgcttctgcagagagcggaaggctggcaccacatccggcctcctggcctgcaggccgtcgctggacgtgtcggtgaagatgcctgaggtggcctcggccgtgtcctcatcctcactgctgggtgcctccacctcgggagagctgctgctgccattcagggcagaagccagcttgatggcagacacctcgccaccagtagcaggcgtgggagagtcaggcagggcatcaggggcgtcgggggcactggcctcctccgagggaagtggggctccctcctgggatggggaggggacggaaggaaggggcaggcggggtccggtagtgccctcagcctccgtggcaagcttgggctctgcctgcgggtggtcacccccactactggctgtctctgtccaggagggtgtaaccaggcagggagcaggtgccaggccctgggcagagcatagatgagggaggccggggcagcagcctggctcctgggcagaggctgcctggagcccaagcagaggctctccagggtaccccggctcgggggaggcccgtggggtctgctttggactggggcagccctcagcgtggccgcccgcagagacggggtcccaggactctggacagcggctgccgctgttgttgttggctgacacgttggagcgccagtgcccgcgctgggcggccctccgcgctcccacctcctctagctcatcctcgccagtcagcggcagcgggggcgcccctgagctccccaaaggggacgtgcccagtgggtcctcgaagaaggcaggacagaaggcggccacgccccagtctgcatcctccgctcctccctccgccagactcaggggccccgccgagggcgagggagagcgtgaggggcagagcgggtcccgcgccaagcttctgcgagggtagtggtcgccgcggccccaggggacgtcgacgggtggcccgtggcccagcagcggctccatggccagcgaggcggcggtgctgccgtcagagtcgtcgtcctggtccgcggtggcaggtggactgggggcgcagccggcgcagtcagggtcgtggccggcggcgggtgcggcctcctctaggcggatgaagtactcgctgcccagcgacgggctgtgcgcgctgagcaccggaaccacgcccgggggcgcgccgtcgggggcgcacagctcctgcaggcgtgcggtgcggccagggctcagcgtggccgggaaggcctccgcgccgcggcccgcctcccacttgtactcaaaattgaggcctcggctggtctcggtcaccgtcagcacgtcgtcgccgtccgcgtggaagccgtcgcccgcgaactgctccagcagcgggaaggacgaggcagcggcgagctccaccacgccgcccagcatgggccccgccgcaccgggcccgggccccac
